(19) United States
(12) Patent Application Publication
(10) Pub. No.: US 2012/0263724 A1
(43) Pub. Date: Oct. 18, 2012

(54) Escherichia coli o157:h7 proteins and uses thereof

(76) Inventors: Manohar John, Ames, IA (US); Indira T. Kudva, Ames, IA (US); Stephen B. Calderwood, Wellesley, MA (US); Bryan Krastins, Somerville, MA (US); David A. Sarracino, Andover, MA (US)

(21) Appl. No.: 11/919,021

(22) PCT Filed: Apr. 20, 2006
(86) PCT No.: PCT/US06/15100

§ 371 Date: Jun. 14, 2010

Related U.S. Application Data
(60) Provisional application No. 60/673,599, filed on Apr. 20, 2005.

(51) Int. Cl. C07K 14/245; C12N 15/63; C12N 1/21; C12N 1/19; C12N 5/10; C12P 21/00; C12P 21/08; C12Q 1/68; G01N 33/566; A61K 39/108; A61P 37/04; A61P 31/04; C12N 15/31; C07K 16/12; A61K 39/40; C40B 20/08

(52) U.S. Cl. 424/139.1; 506/6; 435/320.1; 435/252.33; 435/254.21; 435/348; 435/325; 435/357; 435/367; 435/365; 435/70.2; 435/70.21; 435/6.13; 436/501; 530/350; 424/190.1; 536/23.7; 530/387.9

(57) ABSTRACT

Immunogenic Escherichia coli O157:H7 (0157) proteins expressed during infection of a mammal, are described. In particular, 0157 proteins expressed specifically in vivo during human and cattle infection were identified. These proteins, mapped to the backbone, O-islands (OIs) and pO157. Because these-proteins are expressed during infection, and might help pathogens adapt to and counter hostile in vivo environments, those proteins identified in this study are useful as targets for drug and vaccine development. Also, such proteins are useful as markers of 0157 infection in stool specimens. Also described are methods of identifying immunogenic proteins.

### BACKGROUND OF THE INVENTION

[0001] The invention relates to immunogenic Escherichia coli O157:H7 (O157) proteins, in particular, proteins that are immunogenic in humans or cattle or both. This invention also relates to methods for identifying immunogenic proteins derived from a pathogen.

[0002] Enterohemorrhagic Escherichia coli (EHEC) O157:H7 (O157) is a pathogen which causes disease ranging from acute, self-resolving watery diarrhea to hemorrhagic colitis (HC) and the potentially fatal hemolytic uremic syndrome (HUS). Currently, no therapies are available to lessen the potential morbidity and mortality of this infection.

[0003] A common route for human infection is the consumption of beef contaminated with EHEC. Cattle feces seeping into water and the slaughter of infected animals are considered to be the primary sources of E. coli O157 infection in humans. An E. coli O157 vaccine for cattle is a potential solution for preventing human disease because it deals with the problem at the source (the cattle's gastrointestinal tract) and prevents the bacteria from getting into the water supply and food chain, where it can cause illness in humans.

[0004] O157 is thought to have evolved from a strain of the enteropathogenic E. coli (EPEC) O55:H7 bearing the pathogenicity island termed the locus for enterocyte effacement (LEE), through the acquisition of bacteriophages encoding Shiga toxins type 1 (stx₁) and/or 2 (stx₂), a virulence plasmid (pO157), transition of somatic antigen O55 to O157 and loss of sorbitol fermentation and β-glucuronidase activity (Kaper et al. 2004. Nat Rev Microbiol 2:123-140). HUS as a complication of O157 infection has been associated with the presence of the stx₂ or its variant stx_{2c} genes in the infecting O157 strain (Ibid). In addition, the characteristic attaching and effacing (A/E) lesions produced by this organism on the human colonic epithelium are a result of proteins encoded on the LEE, including the adhesion molecule intimin-γ (Eae), its receptor (Tir), the type III protein secretion system that secretes a variety of LEE-encoded translocator proteins (EspA, EspB, and EspD) that translocate effectors into host cells, and effector proteins (Tir, EspG, EspF, Map, and EspH) that modulate the host cell cytoskeleton (Ibid). The type III secretion system translocates Tir into the host cell, with subsequent trafficking to the host cell membrane. Intimin binding of Tir leads to host cell actin rearrangement and formation of A/E lesions. Other putative virulence factors are encoded on pO157 and include an enterohemolysin (Ehx), an immunomodulator (Lif), and a serine protease (EspP) (Ibid). Hence several factors may be involved in E. coli O157 pathogenesis and research is ongoing to understand the complexity of this infection.

[0005] The sequenced O157 EDL933 genome shows that although this organism shares 4.1 Mb of DNA with E. coli K-12 (termed backbone), it has 1.34 Mb of DNA distributed among 177 DNA segments termed O-islands that is absent in K-12 (Perna et al. 2001. Nature 409:529-533). Of the genes found in these O-islands, only 40% have been assigned a function and several remain to be characterized (Ibid). Collective evidence indicates that intimin-γ and the Shiga toxins act in concert with other unidentified virulence factors, encoded by both the O-island and backbone sequences, to cause the spectrum of O157 disease (Kaper et al. 2004. Nat Rev Microbiol 2:123-140; Torres and Kaper 2003. Infect Immun 71:4985-4995).

### SUMMARY OF THE INVENTION

[0006] Using in vivo-induced antigen technology (IVIAT), a modified immunoscreening technique that circumvents the need for animal models, we have directly identified immunogenic Escherichia coli O157:H7 (O157) proteins expressed specifically during human infection, but not during growth under standard laboratory conditions. IVIAT identified 223 O157 proteins expressed specifically in vivo during human infection, several of which were unique to this study. These in vivo-induced (ivi) proteins, encoded by ivi-genes, mapped to the backbone, O-islands (OIs) and pO157. Lack of in vitro expression of O157-specific ivi-proteins was confirmed by proteomic analysis of a mid-exponential phase culture of O157 grown in LB broth. Because ivi-proteins are expressed in response to specific cues during infection, and might help pathogens adapt to and counter hostile in vivo environments, those identified in this study are useful as targets for drug and vaccine development. Also, such proteins may be exploited as markers of O157 infection in stool specimens.

[0007] In addition to the IVIAT system, we developed a novel application of proteomics, Proteomics-based Expression Library Screening (PELS), to independently identify 207 proteins which are immunogenic in cattle. These only include proteins produced during infection of cattle, and not those produced exclusively in vitro. As with the proteins identified by IVIAT, these proteins are useful targets for drug and vaccine development, and as diagnostic markers for O157 infection.

[0008] In one aspect, the invention features an isolated nucleic acid molecule including a sequence substantially identical to any one of polynucleotides described in Tables 2, 3, or 7. In one embodiment, the isolated nucleic acid molecule includes any of the above-described sequences or a fragment thereof; and is derived from a pathogen (e.g., from a bacterial pathogen such as E. coli O157). Additionally, the invention includes a vector and a cell, each of which includes at least one of the isolated nucleic acid molecules of the invention; and a method of producing a recombinant polypeptide involving providing a cell transformed with a nucleic acid molecule of the invention positioned for expression in the cell, culturing the transformed cell under conditions for expressing the nucleic acid molecule, and isolating a recombinant polypeptide. The invention further features recombinant polypeptides produced by such expression of an isolated nucleic acid molecule of the invention, and substantially pure antibodies that specifically recognize and bind such recombinant polypeptides.

[0009] In an another aspect, the invention features a substantially pure polypeptide including an amino acid sequence that is substantially identical to the amino acid sequence of any one of the amino acids described in Tables 2, 3, or 7. In one embodiment, the substantially pure polypeptide includes any of the above-described sequences or an immunogenic fragment thereof; and is derived from a pathogen (e.g., from a bacterial pathogen such as E. coli O157).

[0010] In yet another related aspect, the invention features a method for identifying a compound which is capable of decreasing the expression of a pathogenic factor (e.g., at the transcriptional or post-transcriptional levels), involving (a) providing a pathogenic cell expressing any one of the isolated nucleic acid molecules of the invention; and (b) contacting the pathogenic cell with a candidate compound, a decrease in expression of the nucleic acid molecule following contact with the candidate compound identifying a compound which decreases the expression of a pathogenic virulence factor. In preferred embodiments, the pathogenic cell infects a mammal (e.g., a human).

[0011] In yet another related aspect, the invention features a method for identifying a compound which binds a polypeptide, involving (a) contacting a candidate compound with a substantially pure polypeptide including any one of the amino acid sequences of the invention under conditions that allow binding; and (b) detecting binding of the candidate compound to the polypeptide.

[0012] In addition, the invention features a method of treating a pathogenic infection in a mammal, involving (a) identifying a mammal having a pathogenic infection; and (b) administering to the mammal a therapeutically effective amount of a composition which inhibits the expression or activity of a polypeptide encoded by any one of the nucleic acid molecules of the invention. In preferred embodiments, the pathogen is E. coli O157.

[0013] In yet another aspect, the invention features a method of treating a pathogenic infection in a mammal, involving (a) identifying a mammal having a pathogenic infection; and (b) administering to the mammal a therapeutically effective amount of a composition which binds and inhibits a polypeptide encoded by any one of the amino acid sequences of the invention. In preferred embodiments, the pathogenic infection is caused by E. coli O157.

[0014] In general, the invention includes any nucleic acid sequence which may be isolated as described herein or which is readily isolated by homology screening or polymerase chain reaction (PCR) amplification using the nucleic acid sequences of the invention. Also included in the invention are polypeptides which are modified in ways which do not abolish their pathogenic activity (assayed, for example as described herein). Such changes may include certain mutations, deletions, insertions, or post-translational modifications, or may involve the inclusion of any of the polypeptides of the invention as one component of a larger fusion protein. Also, included in the invention are polypeptides that have lost their pathogenicity.

[0015] Thus, in other embodiments, the invention includes any protein that is substantially identical to a polypeptide of the invention. Such homologs include other substantially pure naturally-occurring polypeptides as well as allelic variants; proteins having substantial identity to any protein found in Tables 2, 3, or 7 isolated from naturally occurring related strains of E. coli, or other pathogenic bacteria; natural mutants; induced mutants; proteins encoded by DNA that hybridizes to any one of the nucleic acid sequences of the invention under high stringency conditions or, less preferably, under low stringency conditions (e.g., washing at 2×SSC at 40° C. with a probe length of at least 40 nucleotides); and proteins specifically bound by antisera of the invention.

[0016] The invention further includes analogs of any naturally-occurring polypeptide of the invention. Analogs can differ from the naturally-occurring the polypeptide of the invention by amino acid sequence differences, by post-translational modifications, or by both. Analogs of the invention will generally exhibit at least 85%, more preferably 90%, and most preferably 95% or even 99% identity with all or part of a naturally-occurring amino acid sequence of the invention. The length of sequence comparison is at least 15 amino acid residues, preferably at least 25 amino acid residues, and more preferably more than 35 amino acid residues. Again, in an exemplary approach to determining the degree of identity, a BLAST program may be used, with a probability score between e⁻³ and e⁻¹⁰⁰ indicating a closely related sequence. Modifications include in vivo and in vitro chemical derivatization of polypeptides, e.g., acetylation, carboxylation, phosphorylation, or glycosylation; such modifications may occur during polypeptide synthesis or processing or following treatment with isolated modifying enzymes. Analogs can also differ from the naturally-occurring polypeptides of the invention by alterations in primary sequence. These include genetic variants, both natural and induced (for example, resulting from random mutagenesis by irradiation or exposure to ethanemethylsulfate or by site-specific mutagenesis according to standard methods. Also included are cyclized peptides, molecules, and analogs which contain residues other than L-amino acids, e.g., D-amino acids or non-naturally occurring or synthetic amino acids, e.g., β or γ amino acids.

[0017] In addition to full-length polypeptides, the invention also includes fragments of any one of the polypeptides of the invention. As used herein, the term “fragment,” means at least 5, preferably at least 20 contiguous amino acids, preferably at least 30 contiguous amino acids, more preferably at least 50 contiguous amino acids, more preferably at least 80 or more contiguous amino acids, and most preferably at least 200 amino acids. Fragments of the invention can be generated by methods known to those skilled in the art or may result from normal protein processing (e.g., removal of amino acids from the nascent polypeptide that are not required for biological activity or removal of amino acids by alternative mRNA splicing or alternative protein processing events).

[0018] Furthermore, the invention includes nucleotide sequences that facilitate specific detection of any of the nucleic acid sequences of the invention. Thus, for example, nucleic acid sequences described herein or fragments thereof may be used as probes to hybridize to nucleotide sequences by standard hybridization techniques under conventional conditions. Sequences that hybridize to a nucleic acid sequence coding sequence or its complement are considered useful in the invention. Sequences that hybridize to a coding sequence of a nucleic acid sequence of the invention or its complement and that encode a polypeptide of the invention are also considered useful in the invention. As used herein, the term “fragment,” as applied to nucleic acid sequences, means at least 5 contiguous nucleotides, preferably at least 10 contiguous nucleotides, more preferably at least 20 to 30 contiguous nucleotides, more preferably at least 40 to 80, more preferably at least 100 to 150, more preferably at least 200 to 300, or most preferable at least 400 to 600 or more contiguous nucleotides. Fragments of nucleic acid sequences can be generated by methods known to those skilled in the art.

[0019] The invention further provides a method for inducing an immunological response in a subject, particularly a human or cattle, which includes inoculating the subject with, for example, any of the polypeptides (or a fragment or analog thereof or fusion protein) of the invention to produce an antibody and/or a T cell immune response to protect the subject from infection, especially bacterial infection (e.g., an E. coli infection). The invention further includes a method of inducing an immunological response in a subject which includes delivering to the subject a nucleic acid vector to direct the expression of a polypeptide described herein (or a fragment or fusion thereof) in order to induce an immunological response.

[0020] The invention also includes vaccine compositions including the polypeptides or nucleic acid sequences of the invention. For example, the polypeptides of the invention may be used as an antigen for vaccination of a subject to produce specific antibodies which protect against an E. coli infection. The invention therefore includes a vaccine formulation which includes an immunogenic recombinant polypeptide of the invention together with a suitable carrier.

[0021] In another embodiment, peptide vaccines can be utilized as a prophylactic or therapeutic vaccine in a number of ways, including: 1) as monomers or multimers, 2) combined contiguously or non-contiguously with additional sequences that may facilitate aggregation, promote presentation or processing of the epitope (e.g., class targeting sequences) and/or additional antibody, T helper or CTL epitopes to increase the immunogenicity of the peptide as a means to enhance efficacy of the vaccine, 3) chemically modified or conjugated to agents that would increase the immunogenicity or delivery of the vaccine (e.g., fatty acid or acyl chains, KLH, tetanus toxoid, or cholera toxin), 4) any combination of the above, 5) any of the above in combination with adjuvants, including but not limited to inorganic gels such as aluminium hydroxide, and water-in-oil emulsions such as incomplete Freund's adjuvant, aluminum salts, saponins or triterpenes, MPL, cholera toxin, ISCOM'S®, PROVAX®, DETOX®, SAF, Freund's adjuvant, Alum®, Saponin®, among others.

[0022] An important aspect of this invention is that it includes vaccines formulated for both humans and cattle which include any of the proteins or fragments thereof described herein. The invention also provides for the production of antibodies (e.g., polyclonal or monoclonal) directed to any of the proteins or immunogenic fragments thereof described herein. Such antibodies are especially useful for passive immunization.

[0023] The invention further provides compositions (e.g., nucleotide sequence probes), polypeptides, antibodies, and methods for the diagnosis of a pathogenic condition.

[0024] By “isolated nucleic acid molecule” is meant a nucleic acid (e.g., a DNA) that is free of the genes which, in the naturally-occurring genome of the organism from which the nucleic acid molecule of the invention is derived, flank the gene. The term therefore includes, for example, a recombinant DNA that is incorporated into a vector; into an autonomously replicating plasmid or virus; or into the genomic DNA of a prokaryote or eukaryote; or that exists as a separate molecule (for example, a cDNA or a genomic or cDNA fragment produced by PCR or restriction endonuclease digestion) independent of other sequences. In addition, the term includes an RNA molecule which is transcribed from a DNA molecule, as well as a recombinant DNA which is part of a hybrid gene encoding additional polypeptide sequence.

[0025] By “polypeptide” or “protein” is meant any chain of amino acids, regardless of length or post-translational modification (for example, glycosylation or phosphorylation).

[0026] By a “substantially pure polypeptide” is meant a polypeptide of the invention that has been separated from components which naturally accompany it. Typically, the polypeptide is substantially pure when it is at least 60%, by weight, free from the proteins and naturally-occurring organic molecules with which it is naturally associated. Preferably, the preparation is at least 75%, more preferably at least 90%, and most preferably at least 99%, by weight, a polypeptide of the invention. A substantially pure polypeptide of the invention may be obtained, for example, by extraction from a natural source (for example, a pathogen); by expression of a recombinant nucleic acid encoding such a polypeptide; or by chemically synthesizing the protein. Purity can be measured by any appropriate method, for example, column chromatography, polyacrylamide gel electrophoresis, or by HPLC analysis.

[0027] By “substantially identical” is meant a polypeptide or nucleic acid molecule exhibiting at least 25% identity to a reference amino acid sequence (for example, any one of the amino acid sequences described herein) or nucleic acid sequence (for example, any one of the nucleic acid sequences described herein). Preferably, such a sequence is at least 30%, 40%, 50%, 60%, more preferably 80%, and most preferably 90% or even 95%, 96%, 97%, 98% or 99% identical at the amino acid level or nucleic acid to the sequence used for comparison.

[0028] Sequence identity is typically measured using sequence analysis software (for example, Sequence Analysis Software Package of the Genetics Computer Group, University of Wisconsin Biotechnology Center, 1710 University Avenue, Madison, Wis. 53705, BLAST, BESTFIT, GAP, or PILEUP/PRETTYBOX programs). Such software matches identical or similar sequences by assigning degrees of homology to various substitutions, deletions, and/or other modifications. Conservative substitutions typically include substitutions within the following groups: glycine, alanine; valine, isoleucine, leucine; aspartic acid, glutamic acid, asparagine, glutamine; serine, threonine; lysine, arginine; and phenylalanine, tyrosine. In an exemplary approach to determining the degree of identity, a BLAST program may be used, with a probability score between e⁻³ and e⁻¹⁰⁰ indicating a closely related sequence.

[0029] By “transformed cell” is meant a cell into which (or into an ancestor of which) has been introduced, by means of recombinant DNA techniques, a DNA molecule encoding (as used herein) a polypeptide of the invention. Exemplary polypeptides include those identified in Tables 2, 3, 7, and the amino acid sequences set forth in SEQ ID NOs: 1-340.

[0030] By “positioned for expression” is meant that the DNA molecule is positioned adjacent to a DNA sequence which directs transcription and translation of the sequence (i.e., facilitates the production of, for example, a recombinant polypeptide of the invention, or an RNA molecule).

[0031] By “purified antibody” is meant antibody which is at least 60%, by weight, free from proteins and naturally-occurring organic molecules with which it is naturally associated. Preferably, the preparation is at least 75%, more preferably 90%, and most preferably at least 99%, by weight, antibody. A purified antibody of the invention may be obtained, for example, by affinity chromatography using a recombinantly-produced polypeptide of the invention and standard techniques.

[0032] By “specifically binds” is meant a compound or antibody which recognizes and binds a polypeptide of the invention but which does not substantially recognize and bind other molecules in a sample, for example, a biological sample, which naturally includes a polypeptide of the invention.

[0033] By “derived from” is meant isolated from or having the sequence of a naturally-occurring sequence (e.g., a cDNA, genomic DNA, synthetic, or combination thereof).

[0034] By “infected” or “infection” is meant a state produced by the establishment of an infective agent in or on a subject; including a disease resulting from an infection. These terms also include an act or process of infecting as well as the establishment of a pathogen in a subject after invasion.

[0035] By “inhibiting a pathogen” is meant the ability of a candidate compound to decrease, suppress, attenuate, diminish, or arrest the development or progression of a pathogen-mediated disease or an infection in a eukaryotic subject. Preferably, such inhibition decreases pathogenicity by at least 5%, more preferably by at least 25%, and most preferably by at least 50%, as compared to symptoms in the absence of the candidate compound in any appropriate pathogenicity assay (for example, those assays described herein). In one particular example, inhibition may be measured by monitoring pathogenic symptoms in a subject exposed to a candidate compound or extract, a decrease in the level of symptoms relative to the level of pathogenic symptoms in a subject not exposed to the compound indicating compound-mediated inhibition of the pathogen.

[0036] By “pathogenic virulence factor” is meant a cellular component (e.g., a protein such as a transcription factor, as well as the gene which encodes such a protein) without which the pathogen is incapable of causing disease or infection in a eukaryotic subject. Exemplary virulence factors are those described herein which are expressed specifically during human infection.

[0037] By “immune response” is meant a series of molecular, cellular, and organismal events that are induced when an antigen is encountered by the immune system. These may include the expansion of B- and T-cells and the production of antibodies. Aspects of an immune response, such as the expansion of T cell, B cell, or other antigen presenting cell populations may take place in vitro for administration to a subject. The immune response may provide a defense against foreign substances or organisms. To determine whether an immune response has occurred and to follow its course, the immunized subject can be monitored for the appearance of immune reactants directed at the specific antigen.

[0038] By “immunogenic” is meant the ability of a substance or composition or pathogen to induce an immune response.

[0039] By “adjuvant” is meant a compound (e.g., an immunomodulator) which non-specifically stimulates or enhances an immune response (e.g., production of IgA antibodies). Administration of an adjuvant in conjunction with an immunogenic composition facilitates the induction of an immune response to the immunogenic compound and assists in the prevention, amelioration, or cure of a pathogenic infection or disease.

[0040] By “treating” or “treatment” is meant reduction of the severity, progression, spread, and/or frequency of symptoms, elimination of symptoms and/or underlying cause, prevention of the occurrence of symptoms and/or their underlying cause, and improvement or remediation of damage. Exemplary treatment modalities include therapeutic treatment as well as prophylactic, or suppressive measures for an infection.

[0041] By “prophalactic” is meant a treatment that results in the prevention of disease in a subject.

[0042] By “therapeutic” is meant a treatment that results in alleviation or amelioration from a pre-existing disease.

[0043] A feature of the invention is the rapidity of proteome-wide immunogenic protein-identification, which renders Proteomics-based Expression Library Screening (herein referred to as “PELS”) an ideal alternative/complement to emerging protein chip/array technologies. Other attractive features include broad applicability, robustness, and an elimination of subjective bias. Also, because proteins are expressed from genes on inserts within clones of a genomic DNA expression library, a more comprehensive determination of the immunoproteome of the cognate pathogen is possible.

[0044] The invention provides a number of targets that are useful for the development of drugs that specifically block the pathogenicity of a microbe. In addition, the methods of the invention provide a facile means to identify compounds that are safe for use in eukaryotic subjects (i.e., compounds which do not adversely affect the normal development and physiology of the organism), and efficacious against pathogenic microbes (i.e., by suppressing the virulence of a pathogen). In addition, the methods of the invention provide a route for analyzing virtually any number of compounds for an anti-virulence effect with high-volume throughput, high sensitivity, and low complexity. The methods are also relatively inexpensive to perform and enable the analysis of small quantities of active substances found in either purified or crude extract form.

[0045] Other features and advantages of the invention will be apparent from the detailed description, and from the claims.

### BRIEF DESCRIPTION OF THE DRAWINGS

[0046] FIG. 1. Reactivity of pooled, unadsorbed (Panel A) and adsorbed (Panel B) HUS sera against two known O157 virulence proteins, intimin and EspA, and an unrelated negative control protein, PilA, from V. cholerae.

[0047] FIG. 2. EIA reactivity of sera with in vitro grown O157 lysates after each step in sequential adsorption. OD₄₀₅ values were corrected for background and for dilution during adsorption.

[0048] FIG. 3. Graphical representation of the location of ivi-genes on the chromosome of E. coli O157 strain EDL 933. Outer and inner circles show the positions of ivi-genes on the backbone and O-islands, respectively. The black numbers on the outside of the inner circle refer to individual OIs (Perna et al. 2001. Nature 409:529-533). Individual OI-genes, phage-associated genes, the LEE (encoding intimin-γ), CP-933V (encoding Stx1), and BP-933W (encoding Stx2) are also indicated. OI groups, I, II and III are indicated by brackets (see text). The innermost circle shows the scale in base pairs. Figure was created using the Genvision software from DNASTAR.

[0049] FIG. 4. Graphical representation of the location of ivi-genes on the pO157 plasmid of E. coli O157 strain EDL 933. Outer circle shows the position of ivi-genes (magenta), and the inner circle, the scale in base pairs. Figure was created using the Genvision software from DNASTAR.

[0050] FIG. 5. Flow chart of PELS screening process.

[0051] FIG. 6. SDS-PAGE profiles of recombinant O157 proteins in elutions from columns coupled to bait PAbs (“charged”) or “uncharged” columns. Multiple O157 expression library cultures were induced with a range of IPTG concentrations at an initial OD₆₀₀ of 0.6. Following incubations at different temperatures for varying lengths of time, cell-lysates and pellets prepared from pooled, pelleted cultures were loaded on “charged” or “uncharged” columns. Elutions were fractionated on SDS-PAGE Tris-Glycine 8-16% gradient gels and visualized by SimplyBlue Safe staining. FIG. 6A shows elutions from a “charged” column (test) loaded with lysate fractions. FIG. 6B shows elutions from an “uncharged” column (control) loaded with lysate fractions. FIG. 6C shows elutions from a “charged” column (test) loaded with pellet fractions. FIG. 6D shows elutions from an “uncharged” column (control) loaded with pellet fractions. (1) indicates the molecular weight ladder.

[0052] FIG. 7. Reactivity of purified E. coli O157 LPS and recombinant E. coli BL21(DE3) (pET-30b) expressing various bacterial proteins with pooled hyperimmune sera from cattle experimentally infected with E. coli O157. FIG. 7A is a dot immunoblot of purified O157 LPS, spotted in duplicate, screened with pooled, unadsorbed hyperimmune bovine sera. FIG. 7B is a Dot immunoblot of O157 LPS, spotted in duplicate (test); 2, Colony immunoblot of four recombinant clones expressing PilA of V. cholerae, an irrelevant protein (control); and 3, Colony immunoblot of four recombinant clones expressing EspB of E. coli O157 (test), screened with pooled hyperimmune bovine sera adsorbed against purified E. coli O157 LPS.

### DETAILED DESCRIPTION

[0053] A pathogen expresses specific proteins during infection of a subject. The methods described herein identify such proteins. In the first two working examples, immunogenic E. coli proteins are identified that are expressed during infection of humans and cattle. An additional example is then presented which provides methods useful to identify immunogenic proteins from virtually any pathogen.

### Example 1

### E. coli Antigens Identified in Humans

[0054] To date, the main impediment to identifying a broader complement of virulence factors in this pathogen has been the lack of an animal model that mimics the spectrum of human disease. Also, the potentially fatal sequelae that can follow O157 infection preclude human volunteer studies. We circumvented these limitations and exploited the human immune response following O157 infection itself to identify a panel of microbial factors that might contribute to the pathogenicity of this organism. In particular, we used a modified immunoscreening technique called in vivo-induced antigen technology (IVIAT) (Handfield et al. 2000. Trends Microbiol 8:336-339) to identify immunogenic O157 proteins that are either expressed during infection but not during growth in standard laboratory media, or expressed at significantly higher levels in vivo than in vitro. The rationale was that such antigens expressed in response to unique signals encountered within the gastrointestinal tract might contribute to pathogen adaptation and survival within the gut, and hence play important roles in the virulence of this organism. Below we describe the identification of O157 proteins that are expressed uniquely during human infection but not during in vitro growth, and indicate that several of the genes encoding such proteins are conserved through evolution. These identified proteins are useful as targets for development of diagnostics, drugs, and vaccines.

### Materials and Methods

[0055] Recombinant DNA Methods.

[0056] Isolation of plasmid DNA, restriction digestions, and agarose gel electrophoresis were performed using standard procedures (Sambrookand Russel 2001. A Laboratory Manual. Cold Spring Harbor Laboratory Press, Cold Spring Harbor, N.Y.). All enzymes for restriction digestions, DNA modifications and ligations were from New England Biolabs, Beverly, Mass. DNA sequencing was performed at the DNA Sequencing Core Facility, Department of Molecular Biology, Massachusetts General Hospital, using ABI Prism DiTerminator cycle sequencing with AmpliTaq DNA polymerase FS with an ABI 377 DNA sequencer (Perkin-Elmer Applied Biosystems Division, Foster City, Calif.). Oligonucleotides for PCR and sequencing were obtained from the DNA Synthesis Core Facility, Department of Molecular Biology, Massachusetts General Hospital. Plasmids were electroporated into E. coli DH5α or BL21(DE3) using a Gene Pulser (Bio-Rad Laboratories, Richmond, Calif.) as instructed by the manufacturer. Electroporation conditions were 2,500 V at 25-mF capacitance, producing time constants of 4.8 to 4.9 ms.

[0057] Bacterial Strains, Plasmids, and Growth Conditions.

[0058] An isolate of O157, from a patient who recovered from recent, clinically diagnosed HUS, and contributed a serum sample to the pool of convalescent-phase sera for probing the expression library, was used to construct the expression DNA library (see below). E. coli X21-Blue (pEB313) expressed an intracellular derivative of intimim-γ, His₆-intimin-γ (McKee et al. 1996. Infect Immun 64:2225-2233), from which the putative signal sequence of 34 amino acids had been removed (gift of Dr. Alison O'Brien, Uniformed Services University of the Health Sciences, Bethesda, Md.). E. coli DH5a (pCVD468, pREP4) expressed a genetically engineered version of EspA, His₆-EspA (Karpman et al. 2002. Pediatr Nephrol 17:201-211), which was a gift from Dr. James B. Kaper, University of Maryland School of Medicine, Baltimore, Md. Bacterial strains were grown in vitro in Luria-Bertani (LB) medium, and maintained at −70° C. in LB broth containing 15% glycerol. Kanamycin (kan) and ampicillin (amp) were used at concentrations of 50 μg/ml and 100 μg/ml, respectively.

[0059] Patient and Control Sera.

[0060] Convalescent-phase sera (approximately 500 μl/patient) were obtained from four patients who had recovered from HUS following O157 infection (HUS-convalescent sera). Age of the patients ranged from 2-10 yrs, and sera were collected on day 13-96 post-illness. A serum sample from a healthy pediatric patient was used as the control. All of the above serum samples were collected at the Children's Hospital and Regional Medical Center, Seattle, Wash., for routine laboratory investigations and only excess sera was used for this study. The Institutional Review Board of the Children's Hospital and Regional Medical Center approved the use of these sera, which were stored at −70° C. until used.

[0061] Assessment of Reactivity of Pooled, Unadsorbed HUS-Convalescent and Healthy Control Sera with Immunogenic O157 Proteins.

[0062] Sera were assessed by examining their reactivity via colony immunoblotting (described below), against E. coli XL1-Blue (pEB313) expressing His₆-intimin-γ, plated on LB-amp plates (McKee et al. 1996. Infect Immun 64:2225-2233), and E. coli DH5α (pCVD468, pREP4) expressing His₆-EspA, on LB-amp+kan plates (Karpman et al. 2002. Pediatr Nephrol 17:201-211). Both EspA and intimin-γ are expressed during human infection and targeted by the immune response (Ibid; McKee et al. 1996. Infect Immun 64:2225-2233).

[0063] Adsorption of HUS-Convalescent and Control Sera.

[0064] To compensate for variations in immune responses of individual patients and identify the widest array of O157 antigens, equal volumes of HUS-convalescent serum samples from four patients were pooled, and sequentially adsorbed against the O157 isolated from one of the four patients (the same O157 isolate used to generate the expression library).

[0065] The adsorption protocol has been described previously (Hang et al. 2003. Proc Nat Acad Sci USA 100:8508-8513). Briefly, a protease inhibitor cocktail formulated for bacterial cells and containing 4-(2-aminoethyl)benzenesulfonyl fluoride (AEBSF; 23 mM), ethylenediaminetetraacetic acid (EDTA; 100 mM), bestatin (2 mM), pepstatin A (0.3 mM) and E-64 (0.3 mM), was prepared per the manufacturer's (Sigma, St. Louis, Mo.) instructions, and then added to intact cells and cell-lysates at a dilution of 1:10. Pooled, BUS-convalescent sera were sequentially adsorbed against in vitro grown (LB broth, 37° C.) O157 whole cells, cell-lysates (prepared by 3 cycles of freezing and thawing, followed by sonication) and heat-denatured cell-lysates (Ibid). Adsorbed sera were stored at −70° C. until further use.

[0066] Individual HUS-convalescent serum samples from each of the four patients, and the control serum sample, were adsorbed against whole cells, cell-lysates and heat-denatured cell-lysates of in vitro grown (LB-kan broth, 37° C.) expression host, E. coli BL21(DE3) containing the native expression plasmids, pET-30 abc, in a similar manner.

[0067] The efficiency of adsorption of pooled, HUS-convalescent sera was assessed using an enzyme immunoassay described previously (Ibid) and detailed below. Adsorption efficiency was further evaluated by reacting sera with recombinant clones expressing His₆-intimin-γ and His₆-EspA, via colony immunoblotting as described below.

[0068] Efficiency of Adsorption of Pooled, HUS-Convalescent Sera.

[0069] Microtiter wells were coated with 100 μl of a 1:2 dilution of in vitro grown O157 lysate (same isolate used to make the DNA expression library) in 50 mM carbonate buffer (pH 9.6), prepared by three cycles of freezing and thawing followed by sonication. Following overnight incubation at room temperature, wells were washed with phosphate buffered saline (PBS) containing 0.05% of Tween 20 (PBS-T), and blocked with a 1% solution of BSA. After 1 h incubation at 37° C., wells were emptied, and 100 μl dilutions (1:200 to 1:25,600) of sera, removed from the pool after each adsorption step, were added to wells. The wells were incubated for 1 h at 37° C. and washed, after which 100 μl of a 1:1000 dilution of horseradish peroxidase-conjugated goat anti-human affinity-purified IgG reactive against all classes of human immunoglobulins (ICN, Cappel, Aurora, Ohio), were added to the wells. Wells were incubated for 1 h at 37° C. and washed with PBS-T. Reactions were developed with a 1 mg/ml solution of 2,2′-azinobis(ethylbenzthiazolinesulphonic acid) (ABTS; Sigma, St. Louis, Mo.) with 0.1% H₂O₂ (Sigma). The OD₄₀₅ was determined kinetically with a Vmax microplate reader (Molecular Devices Corporation, Sunnyvale, Calif.). Plates were read for 5 min at 19-s intervals, and the maximum slope for an OD change of 0.2 U was determined as milli-OD units/min (John et al. 2000. Infect Immun 68:1171-1175).

[0070] Construction of an Inducible, E. Coli O157:H7 Genomic DNA Expression Library.

[0071] Polymorphic amplified typing sequences (PATS), a powerful and user-friendly typing methodology for bacterial pathogens that compares well with pulsed-field gel electrophoresis (PFGE) (Kudva et al. 2002. J Clin Microbiol 40:1152-1159; Kudva et al. 2004. J Clin Microbiol 42:2388-2397), profiled the cognate O157 isolates from the 4 HUS patients as heterogeneous. We therefore selected one isolate at random, purified genomic DNA and generated the DNA expression library.

[0072] To generate the expression library, vector DNA was prepared by digesting with the restriction enzyme BamHI (New England Biolabs, Beverly, Mass.). The vectors used were the pET-30abc series of expression vectors (Novagen, Madison, Wis.) that permit the cloning of inserts in each of the three reading frames under the transcriptional control of the T7 phage promoter. The restriction enzyme-digested plasmid DNA was gel-purified using the QIAEX II Gel Extraction Kit (Qiagen, Valencia, Calif.), and then treated with shrimp alkaline phosphatase. Genomic DNA of an O157 isolate from one of the four HUS patients was partially digested with the restriction enzyme, Sau3AI. Following fractionation on a 1% agarose gel, DNA fragments ranging in size from ca. 0.5-1.5 kbp (insert DNA) were excised and purified using the QIAEX Gel Extraction Kit (Qiagen). Various ratios of insert and vector DNA were ligated and used to transform competent E. coli DH5α via electroporation according to standard protocols (Sambrookand Russel 2001. A Laboratory Manual. Cold Spring Harbor Laboratory Press, Cold Spring Harbor, N.Y.). Transformants were plated on LB plates supplemented with 50 μg/ml of kanamycin (LB-kan). After an overnight incubation at 37° C., growth was scraped off the plates, plasmid DNA isolated using standard procedures (Ibid), and used to transform electro-competent E. coli BL21(DE3) (Novagen), a general purpose expression host. To determine the percentage of transformants containing inserts, the library was plated on LB-kan and 100 colonies were randomly picked and analyzed by colony PCR using vector-specific primers. Greater than 90% of transformants contained inserts ranging in size from 0.2 kbp-1.8 kbp.

[0073] Screening of the Expression Library and Identification of Clones Expressing Immunogenic O157 Proteins.

[0074] The expression library was first screened with pooled, unadsorbed HUS-convalescent sera as follows. An optimal dilution of the library in E. coli BL21 (DE3) was plated on LB-kan to yield ca. 300-350 colonies per plate. After 5 h of incubation at 37° C., colonies were lifted using a nitrocellulose filter, and placed colony side up on fresh LB-Kan plates containing 1 mM isopropyl-β-D-thiogalactoside. Plates were incubated overnight at 30° C. to induce expression of genes contained within cloned inserts. Colonies on plates were partially lysed by exposing them to chloroform vapors for 15 min in a candle jar. The filters were removed from the plates, air dried and blocked using 5% non-fat milk in PBS (pH 7.4) for 1 h at room temperature. After rinsing with PBS-T, the filters were probed with a 1:500 dilution of pooled, unadsorbed HUS-convalescent sera for 1 h at room temperature on a rocking platform. Filters were washed 3× with PBS-T, and incubated with a 1:5000 dilution of peroxidase-labeled goat IgG directed against human gamma globulin fraction (ICN/Cappel). Following development with an ECL chemiluminescence kit (Amersham Pharmacia Biotech), reactive clones were identified by their positions on the reference plate (the original plate from which the colonies were lifted that was also incubated overnight at 30° C.). Each reactive clone identified in the primary screen was purified further, and tooth-picked in a grid pattern such that each test clone alternated with E. coli BL21 (DE3) (pET-30a), the negative control, and processed as described above.

[0075] Identification of O157 Proteins Expressed Exclusively During Human Infection Using IVIAT.

[0076] To identify proteins expressed by O157 exclusively during human infection and not during in vitro growth, the clones identified above were subjected to IVIAT using pooled, adsorbed HUS-convalescent sera. Clones were tooth-picked onto LB-kan plates in a grid pattern, and incubated for 5 h at 37° C. Processing of filters and screening were identical to that described above, except that a 1:100 dilution of pooled, adsorbed HUS-convalescent sera was used as a probe. Following confirmation by 4 additional rounds of screening, plasmid inserts were sequenced and encoded proteins were identified via BLAST against the genomic sequence of E. coli O157:H7 EDL 933 and Sakai strains. Proteins expressed from inserts within positive clones were called in vivo-induced proteins (ivi-proteins), and the genes encoding them were referred to as ivi-genes. Positive clones were further probed with individual, adsorbed, HUS-convalescent serum samples from each of the four patients, and the control serum sample, as described above.

[0077] Cellular localization of ivi-proteins was predicted using PSORT/PSORT-B program. Hypothetical ivi-proteins were assigned putative functions using the Clusters of Orthologous Groups (COGs) database available at. The online browser tool, Proteome Navigator, was used to compare proteins not assigned specific functions by the COGs database against Prolinks, a database of protein functional linkages derived from co-evolution (Bowers et al. 2004. Genome Biol 5:R35.

[0078] Proteomic Analysis of O157 Grown in LB Broth Using Microcapillary High Performance Liquid Chromatography Combined with Electrospray Ionization Tandem Mass Spectrometry (ESIμLC-MS/MS).

[0079] To confirm that the ivi-proteins were not expressed when O157 was cultured under standard laboratory conditions, O157 grown in LB broth were subjected to ESIμLC-MS/MS, at the Harvard Partners Center for Genetics and Genomics, Cambridge, Mass. The O157 whole cells for one dimensional microcapillary high performance liquid chromatography-tandem mass spectrometry (1D μLC-MS/MS) analysis were prepared as follows: mid-log phase O157 (OD₆₀₀=0.7) cultured at 37° C. in LB broth were pelleted via centrifugation at 4° C. and washed twice in deionized water. Cells were aliquotted into 1.5 mL tarred centrifuge tubes, frozen at −80° C. and lyophilized to dryness under high vacuum. The tubes were then weighed again and the total dried cell pellet weight determined. Dried O157 pellets (2 mg) were dissolved in 200 μL of 6M urea, 1% SDS 100 mM ammonium bicarbonate 10 mM DTT (pH 8.5). Samples were vortexed, and following incubation at 37° C. for 1 hour, 12 μL of 500 mM iodoacetamide, 100 mM ammonium bicarbonate pH 8.5 was added to each 200 μL sample. The reaction was allowed to proceed at room temperature for 1 hour in the dark. Alkylation was quenched by the addition of 2 μL of 2M DTT in 100 mM ammonium bicarbonate pH 8.5. Samples were then diluted 8 fold with 5 mM CaCl2, mixed with 20 μg of Promega sequencing grade trypsin, and incubated at 37° C. for 16 hours. Following quenching with 2 μL of formic acid, samples were diluted with 2 mL of 0.1% formic acid and cleaned up using a Waters Oasis MCX cartridge. Peptides were eluted with 6% ammonium hydroxide in 50% acetonitrile, frozen and lyophilized. Samples were redissolved in 5% acetonitrile 0.1% formic acid/water and loaded onto a 96 well plate for MS analysis.

[0080] For mass spectrometry, samples were run on a LCQ DECA XP plus Proteome X workstation from Thermo Finnigan. For each run, 85 μL of reconstituted sample was injected with a Surveyor Autosampler, while the separation was done on a 250 μm i.d.×30 cm column packed with C18 media running at a 2 μL per minute flow rate provided from a Surveyor MS pump with a flow splitter, with a gradient of 5-72% water 0.1% formic acid, acetonitrile 0.1% formic acid over the course of 240 min (4 hour). Two such runs were performed. Between each set of samples, two standards of a 5 Angio mix of peptides (Michrom BioResources) were run to ascertain column performance, and observe any potential carryover that might have occurred. The LCQ was run in a top five configuration, with one MS scan and five tandem MS (MS/MS) scans. Dynamic exclusion was set to 1 with a limit of 30 seconds. Peptide ID's were made using SEQUEST™ (Thermo Finnigan) through the Bioworks Browser 3.1. Sequential database searches were made using the E. coli O157:H7 strain EDL933 FASTA database from the EMBL European Bioinformatics institute using differential carbamidomethyl modified cysteines and oxidized methionines. A yeast protein database was spiked in to provide noise and determine validity of the peptide hits. In this fashion, known and theoretical protein hits can be found without compromising the statistical relevance of all the data (Peng et al. 2003. J Proteome Res 2:43-50). Peptide score cutoff values were chosen at Xcorr of 1.8 for singly charged ions, 2.5 for doubly charged ions, and 3.0 for triply charged ions, along with deltaCN values of 0.1, and RSP values of one. The cross correlation values chosen for each peptide assured a high confidence match for the different charge states, while the deltaCN cutoff insured the uniqueness of the peptide hit; RSP value of one insured that the peptide matched the top hit in the preliminary scoring.

### Results and Discussion

[0081] Pooled, Unadsorbed HUS-Convalescent Sera Reacted Specifically with Previously Identified, Immunogenic O157 Proteins.

[0082] Pooled, unadsorbed HUS-convalescent sera reacted strongly and specifically with E. coli XL1-Blue (pEB313) (McKee et al. 1996. Infect Immun 64:2225-2233) and E. coli DH5α (pCVD468, pREP4) (Karpman et al. 2002. Pediatr Nephrol 17:201-211), expressing His₆-intimin-γ and His₆-EspA, respectively, in contrast to E. coli BL21(DE3) expressing recombinant Vibrio cholerae PilA, an irrelevant control protein (FIG. 1A). This suggested that the pool of sera possessed sufficient reactivity for probing the expression library. On the other hand, the unabsorbed healthy control serum did not react with either of these proteins (data not shown).

[0083] Adsorption of Pooled, HUS-Convalescent Sera as Per the IVIAT Protocol Resulted in Selective Depletion of Antibodies Against O157 Antigens Expressed in Vitro.

[0084] Adsorption efficiency was determined by examining the reactivity of serum aliquots from pooled, HUS-convalescent sera after each adsorption step with in vitro grown O157 lysates. There was a sharp decline in reactivity of sera against the in vitro grown O157 lysate following the first adsorption step, compared to the unadsorbed sera, indicating efficient depletion of antibodies against in vitro-expressed O157 proteins (FIG. 2).

Although the adsorbed sera continued to react with the clone expressing His₆-intimin-γ, it did not react with the clone expressing His₆-EspA (FIG. 1B). Since both are reportedly expressed during human infection (Ibid; Li et al. 2000. Infect Immun 68:5090-5095), as well as during in vitro growth (McNally et al. 2001. Infect Immun 69:5107-5114), we anticipated reactivity with both might be eliminated by adsorption of the sera. We attribute residual serum reactivity with intimin-γ to relatively weak in vitro expression of this protein, which may be insufficient to adsorb away all of the anti-intimin-γ antibodies generated in response to significantly higher expression of this adhesin within the gastrointestinal tract.

[0085] Screening of an O157 Genomic Expression Library.

[0086] Primary screening of ca.50,000 clones of an O157 genomic expression library, using pooled, unadsorbed HUS-convalescent sera, yielded 918 reactive clones. IVIAT of these clones using pooled, adsorbed HUS-convalescent sera identified 223 persistently reactive clones containing unique inserts as determined from non-redundant databases.

[0087] IVI-Proteins Included Previously Identified O157 Virulence-Related Proteins.

[0088] IVIAT identified proteins previously reported to have a putative role in O157 virulence ((Besser et al. 1999. Annu Rev Med 50:355-367); Table 1). These included: (i) intimin-γ, the LEE-encoded outer membrane adhesin that acts in concert with other LEE-encoded proteins to generate the attaching-effacing lesion (Kaper et al. 2004. Nat Rev Microbiol 2:123-140), and binding to host nucleolin (Sinclair and O'Brien 2002. J Biol Chem 277:2876-2885) to tether the bacterium to the enterocyte; (ii) QseA, a backbone-encoded LysR-type quorum sensing E. coli transcriptional regulator, which is part of the regulatory cascade that controls expression of O157 virulence factors via quorum sensing (Sperandio et al. 2002. Mol Microbiol 43:809-821). QseA is also present in other gastrointestinal pathogens such as enteropathogenic E. coli (EPEC) (QseA), and V. cholerae (AphB). Following activation by the furanone AI-2, QseA activates transcription of Ler, the positive activator of the LEE operon, and thereby influences expression of putative virulence factors from the LEE. A qseA mutant is impaired in the secretion of LEE-encoded proteins via the Type III secretion system also encoded on the LEE (Sperandio et al. 2002. Infect Immun 70:3085-3093); (iii) TagA, a pO157-encoded inner membrane lipoprotein (Paton et al. 2002. J Clin Microbiol 40:1395-1399). TagA is a protein of unknown function but a putative role in O157 virulence has been suggested because of its presence in a diverse collection of O157 strains (Paton et al. 2002. J Clin Microbiol 40:1395-1399) and the fact that a homolog in V. cholerae is regulated by ToxR, a transcriptional regulator that governs expression of several V. cholerae virulence factors (Harkey et al. 1995. Gene 153:81-84); and (iv) MsbB2, a pO157-encoded inner membrane acyl transferase, which facilitates the synthesis of hexaacyl lipid A, the form with maximal biological activity (Kim et al. 2004. Infect Immun 72:1174-1180). MsbB2 reportedly functions to suppress minor modifications of Lipid A. Acting in conjunction with MsbB1, another homologous acyltransferase expressed from the chromosome, MsbB2 facilitates the synthesis of lipid A of maximal biological activity that interacts optimally with the subject immune system to evoke an immune response to LPS (Ibid). Strongly supporting a role for MsbB2 in O157 virulence is the fact that LPS reportedly acts synergistically with the Shiga toxins, especially Stx2, in the pathogenesis of HUS (Ikeda and Honda 2004. Pediatr Nephrol 19:485-489). Further support for a likely role in O157 virulence is suggested by observations that MsbB2 contributes to virulence of related pathogens such as Shigella flexneri and septicemic E. coli O18:K1:H7 strain H16, and that it influences expression of virulence-related surface structures in diverse pathogens (Kim et al. 2004. Infect Immun 72:1174-1180).

[0089] Ivi-Proteins Expressed from the O157 Backbone.

[0090] A total of 181 ivi-proteins of diverse functional classes were expressed from the backbone (Table 2). Those involved in biosynthesis and metabolism (51.38%) may have functions essential for bacterial growth in vivo, a feature imperative for bacterial pathogenicity. Also, consistent with the anaerobic gut environment, IVIAT identified glycolytic enzymes, hydrogenases involved in fermentation of carbon compounds, an alcohol dehydrogenase, and reductases (including two cryptic nitrate reductases) involved in energy generation from carbohydrates via anaerobic respiration and fermentation (Peekhaus and Conway 1998. J Bacteriol 180:3495-3502). These results were expected and consistent with that of other studies of diverse organisms using techniques such as transcriptional profiling (Xu et al. 2003. Proc Nat Acad Sci USA 100:1286-1291), in vivo expression technology (WET) (Heithoff et al. 1997. Trends Microbiol 5:509-513; Mahan et al. 2000. Amu Rev Genet 34:139-164), recombinase in vivo expression technology (RIVET) (Camilli and Mekalanos 1995. Mol Microbiol 18:671-683), signature-tagged mutagenesis (STM) (Hava et al. 2002. Mol Microbiol 45:1389-1405; Mei et al. 1997. Mol Microbiol 26:399-407; Merrell et al. 2002. Mol Microbiol 43:1471-1491), selective capture of transcribed sequences (SCOTS) (Dozois et al. 2003. Proc Nat Acad Sci USA 100:247-252) and IVIAT of other organisms (Cao et al. 2004. FEMS Microbiol Lett. 237:97-103).

[0091] Transport ivi-proteins (18.78%), included diverse ABC-type transporters and phosphotransferase systems (PTS), permeases, transport proteins involved in the transport of diverse molecules, iron-uptake proteins such as FhuA (a transporter of ferrichrome (Fe3+) and a receptor for phages and colicins), CirA, an iron-regulated receptor for uptake and transport of colicin I, uncharacterized transport proteins, and in particular, an anaerobically-induced permease, TdcC, expressed from the tdc operon that encodes transport and degradation of L-threonine and L-serine. Inactivation of the activator, TdcA, results in hyperadherence of O157 to cultured epithelial cells due to derepression of OmpA expression (Torres and Kaper 2003. Infect Immun 71:4985-4995).

[0092] Regulatory proteins (13.81%) comprised among others, QseA, a LysR-type transcriptional activator (described above) (Sperandio et al. 2002. Mol Microbiol 43:809-821), and several two-component regulatory systems that govern virulence of diverse pathogens (Hoch and Silhavy 1995. Two-Component Signal Transduction, ASM Press, Washington, D.C.). Some of these are functionally interlinked as evidenced by earlier reports (Groisman. 2001. J. Bacteriol. 183:1835-1842; Hagiwara et al. 2003. J. Bacteriol. 185:5735-5746; Heithoff et al. 1999. J. Bacteriol. 181:799-807; Wosten et al. 2000. Cell 103:113-125) and the Prolinks database, suggesting IVIAT identified proteins that sense and integrate diverse environmental signals (such as anaerobiosis, cation limitation, acid, and excess, toxic levels of extracytoplasmic Fe³⁺), and help O157 mount a coordinated cellular adaptive response to counter the hostile host environment. The two-component regulatory systems IVIAT identified were, (i) the sensor molecule, NarX, of the NarL-NarX system, which in the absence of oxygen responds to nitrate or nitrite and acts via NarL, the response regulator that activates expression of enzymes involved in nitrate respiration and represses enzymes involved in respiration of other electron acceptors (Lee et al. 1999. J Bacteriol 181:5309-5316; Rabin and Stewart 1992. Proc Nat Acad Sci USA 89:8419-8423); (ii) the sensor kinase component, PhoQ, of the PhoP-PhoQ system, which responds to extracytoplasmic levels of Mg2+ and Ca2+ (involved in the adaptation to Mg2+ limitation) (Groisman. 2001. J. Bacteriol. 183:1835-1842), and to Zn2+ excess (Hagiwara et al. 2003. J. Bacteriol. 185:5735-5746); (iii) the sensor component, BasS, of the BasR-BasS system that governs the response to excess extracytoplasmic Fe3+ (Wosten et al. 2000. Cell 103:113-125) and mild acid pH (Soncini and Groisman 1996. J Bacteriol 178:6796-6801); (iv) the sensor protein, GlnL, of the GlnG-GlnL system that responds to low ammonia concentration and stimulates ammonia assimilation (Neidhardt et al. 1996. Escherichia coli and Salmonella: Molecular and Cellular Biology. American Society for Microbiology, Washington, D.C.); and (v) HydH, the sensor for HydG, which primarily responds to high periplasmic Zn2+ and Pb2+, and nonspecifically activates the expression of hydrogenase 3, an enzyme involved in hydrogen production during fermentation (Leonhartsberger et al. 2001. J Mol Biol 307:93-105). IVIAT also identified an outer membrane lipoprotein, RcsF, that transduces a signal in response to glucose and zinc to the RcsC/YojN/RcsB/RcsA phosphorelay system, which in turn controls the rcs regulon (target genes), encoding enzymes for colanic acid exopolysaccharide capsule (Hagiwara et al. 2003. J. Bacteriol. 185:5735-5746), an acid-adaptive response that protects O157 from environmental stresses to acid and heat (Mao et al. 2001. J Bacteriol 183:3811-3815). Other ivi-proteins that were part of this functional group and likely to impact in vivo survival of O157 were: (i) PrpR, a regulator of the prp operon involved in catabolism of propionate, a short chain fatty acid (SCFA) that can be detrimental to O157 in high concentrations (exposure to SCFA is a stress condition and catabolism may serve to decrease the concentration of this short chain fatty acid (Kwon and Ricke 1998. Appl Environ Microbiol 64:3458-3463; Polen et al. Appl Environ Microbiol 69:1759-1774); (ii) FucR, a positive regulator of the fuc operon encoding enzymes for metabolism of L-fucose, a component of both mucus and glycans on enterocytes (Peekhaus and Conway 1998. J Bacteriol 180:3495-3502). Following experimental inoculation of mice, O157 reportedly is found attached to both mucus and enterocytes (in contrast to non pathogenic E. coli, which is found in mucus alone) (Miranda et al. 2004. Infect Immun 72:1666-1676), and may utilize L-fucose as one nutrient source to multiply and out-compete other flora to establish infection; (iii) FliS and FliT, which along with FliD negatively regulate the export of the anti-sigma factor, FlgM, to prevent expression of the flagellar regulon (which may promote in vivo survival, since over production of flagella is deleterious to bacterial growth) (Yokoseki et al. 1996. J Bacteriol 178:899-901), and (iv) paraquat-inducible protein A (PqiA), an inner membrane protein of uncharacterized function.

[0093] Ivi-proteins functioning in environmental adaptation (8.84%) included methyl accepting chemotaxis proteins (MCPs), a protein that was part of the adaptive response to hyperosmolarity, a colicin expressed in response to iron-limiting conditions, a modulator of drug activity, and two proteins of the PhoB regulon expressed as part of the adaptive response to phosphate limitation. Specifically, IVIAT identified two methyl accepting chemotaxis proteins (MCPs), namely Trg, a receptor for the periplasmic ribose and galactose binding proteins, and Tsr, the serine sensor receptor, both of which are regulators of chemotaxis and motility (Neidhardt et al. 1996. Escherichia coli and Salmonella: Molecular and Cellular Biology. American Society for Microbiology, Washington, D.C.). Interestingly, MCPs were also highly expressed during human infection with V. cholerae as identified by IVIAT (Hang et al. 2003. Proc Nat Acad Sci USA 100:8508-8513). IVIAT also identified OsmY, a periplasmic protein of unknown function that is induced in response to hyperosmolarity (Yim et al. 1992. J Bacteriol 174:3637-3644). This protein is expressed as part of the Rcs regulon, which includes genes encoding the synthesis of the exo-polysaccharide colanic acid capsule (see above), and possibly functions in the transport of an alternative osmolyte (Hagiwara et al. 2003. J. Bacteriol. 185:5735-5746). One of the ivi-proteins in this subgroup was CirA, an iron-regulated receptor for colicin homologous to a siderophore iron-uptake system, which is also expressed in iron-limiting conditions by other pathogens such as Salmonella typhimurium (Heithoff et al. 1999. J. Bacteriol. 181:799-807). Interestingly, as in previous studies (Ibid; Wosten et al. 2000. Cell 103:113-125), IVIAT identified proteins expressed in response to iron limitation (FhuA and CirA), as well as those expressed in response to extracytoplasmic iron excess (BasS of the BasR-BasS two-component system; see above). Other ivi-proteins included MdaA, a modulator of drug activity, and two proteins that are part of the Pho regulon and expressed as part of the adaptive response to limiting phosphate in the environment, namely, PhoE, an outer membrane porin functioning in the transport of various anions, and a periplasmic, phosphate ester hydrolase, PhoA, involved in the degradation of nontransportable organophosphates (Neidhardt et al. 1996. Escherichia coli and Salmonella: Molecular and Cellular Biology. American Society for Microbiology, Washington, D.C.). The PhoB regulon is required for colonization of the rabbit small intestine by V. cholerae (von Kruger et al. 1999. Microbiol 145:2463-2475), and regulates hilA and invasion genes in S. typhimurium (Lucas et al. 2000. J Bacteriol 182:1872-1882). A possible role in O157 virulence is also suggested by the fact that in vivo expression of PhoB in an avian pathogenic E. coli strain during experimental infection of chickens was identified by SCOTS (Dozois et al. 2003. Proc Nat Acad Sci USA 100:247-252).

[0094] Phage-related proteins (1.11%) included an inner membrane protein of unknown function, and a non-specific protease that degrades the lambda repressor, cII. Those of unknown function (6.08%) rounded off ivi-proteins expressed from the backbone. Collectively, these results suggested that defined backbone ivi-proteins not only support pathogenicity by facilitating in vivo survival, but also regulate and indirectly complement pathogen-specific virulence factors.

[0095] Ivi-Proteins Expressed from O-Islands (OIs).

[0096] The 37 ivi-proteins expressed from OIs included 13 phage-related proteins (Table 3). Because phage proteins include both Stx1 and Stx2 in EHEC, and because they also include proteins that influence every stage of infection of mammalian subjects by diverse pathogens (Wagner and Waldor 2002 Infect Immun. 70:3985-3993), they are potential virulence factors and warrant further evaluation. Although IVIAT did not identify either Stx1 or Stx2, (both are also produced during in vitro growth in LB broth) (Ritchie et al. 2003. Appl Environ Microbiol 69:1059-1066), it identified two homologous ivi-proteins of unknown function, one expressed from each of the phages that encode Stx1 and Stx2. These two ivi-proteins are homologous to ivi-proteins expressed from several other cryptic prophages (Table 3).

[0097] Particularly interesting was that certain OIs (#36 and #71) containing cryptic prophages expressing ivi-proteins, also expressed non-phage, non-LEE (Nle) effectors (proteins encoded outside the LEE, but secreted via the type III secretion apparatus encoded on the LEE) (Deng et al. 2004. Proc Nat Acad Sci USA 101:3597-3602). The presence of Nle homologs, such as NleA and NleF (OI #71) and NleB, NleC, and NleD (OI #36), in related pathogens, and the requirement of NleA for full virulence of C. rodentium, a pathogen of mice, suggest a probable role for phage proteins expressed from these OIs in O157 virulence (Gruenheid et al. 2004. Mol Microbiol 51:1233-1249).

[0098] IVIAT identified 24 clones whose inserts encoded proteins expressed from OI sequences not part of phage genomes (Table 3). These included intimin-γ expressed from the LEE (OI #148), WbdP, a cytoplasmic glycosyl transferase (OI #84) involved in the synthesis of the O-polysaccharide antigen (Wang and Reeves 1998. Infect Immun 66:3545-3551), WaaD, a putative periplasmic glycosyltransferase (OI #145) involved in biosynthesis of the oligosaccharide core of LPS, and numerous ivi-proteins with putative or unknown functions (Table 3). The identification of enzymes involved in both O-antigen and LPS core biosynthesis by IVIAT was expected because LPS is a broadly recognized virulence determinant of pathogenic Gram negative bacteria, and transcripts of genes encoding such enzymes were identified during infection of chickens with avian pathogenic E. coli (APEC) using SCOTS (7). Other non-phage ivi-proteins that could impact O157 virulence included a putative arylsulphatase (OI #40) involved in the scavenging of sulfate and implicated in the ability of E. coli K1 to invade brain microvascular endothelial cells (Hoffman et al. 2000. Infect Immun 68:5062-5067), and a putative recombinant hot spot A (RhsA) protein (OI #30) that reportedly contributes to genomic plasticity (Lin et al. 1984. J Mol Biol 177:1-18). Transcripts of a gene encoding RhsH, a similar protein, were also detected during APEC infection of chickens by SCOTS (Dozois et al. 2003. Proc Nat Acad Sci USA 100:247-252).

[0099] Many non-phage ivi-proteins were expressed from seven of the nine large OIs (>15 kb) that reportedly encode putative virulence factors (Table 4; 5). Besides intimin-γ from OI #148, IVIAT also identified a putative acyl-coenzyme A synthetase (fatty acid:CoA ligase) expressed from OI #138, which catalyzes the formation of fatty acyl-CoA, a substrate for phospholipid biosynthesis and enzymes of β-oxidation, and is involved in diverse functions such as protein transport, protein acylation, enzyme activation, cell signaling, and control of transcription (Neidhardt et al. 1996. Escherichia coli and Salmonella: Molecular and Cellular Biology. American Society for Microbiology, Washington, D.C.); a putative inner membrane ABC-type transport permease expressed from OI #47 and functioning in cell wall biogenesis; a putative, inner membrane ABC-type bacteriocin/lantibiotic exporter expressed from OI #28 that functions in the export of large molecules such as proteins and peptides, and homologous to ATP-binding proteins of ABC transporters and toxin secretion systems of several pathogens, including Pseudomonas putida, Salmonella typhi, and V. cholerae; a cytoplasmic esterase of the α-β hydrolase superfamily expressed from OI #43; a conserved cytoplasmic protein of unknown function expressed from OI #7; and an inner membrane protein of unknown function expressed from OI #48. Interestingly, IVIAT did not identify clones expressing putative virulence factors encoded on OI #115 and OI #122 (Table 4). Perhaps these proteins are expressed equally in vitro and in vivo, resulting in the removal of corresponding reactive antibodies during adsorption, or these proteins are not immunogenic, or antibodies to these proteins are short-lived.

[0100] Ivi-Proteins Expressed from pO157.

[0101] Ivi-proteins expressed from pO157 (Table 3), included the previously discussed TagA and MsbB2; SopA, an ATPase that accurately partitions low copy number F plasmids into daughter cells (also identified during APEC infection of chickens) (Dozois et al. 2003. Proc Nat Acad Sci USA 100:247-252); a putative nickase associated with plasmid maintenance; and a putative hemolysin expression modulating protein, a homolog (90% amino acid identity) of the E. coli regulator Hha (Burland et al. 1998. Nucl. Acids. Res. 26:4196-4204), which complexes with the nucleoid-associated, universal regulator protein, H—NS, and governs expression of the hly operon in response to changes in temperature and osmolarity (Madrid et al. 2002. J Bacteriol 184:5058-5066). In addition, Hha has also been shown to repress the LEE-encoded regulator (Ler) in O157, thereby causing reduced expression of the esp operon encoding the LEE translocator proteins, EspA, EspB, and EspD (Sharma and Zuerner 2004. J Bacteriol 186: 7290-7301).

[0102] Majority of Clones Expressing Ivi-Proteins Reacted Specifically and Broadly with HUS-Convalescent Serum from Individual Patients.

[0103] Ivi-proteins for practical applications such as the development of diagnostic markers, vaccines and drugs, should ideally be expressed strongly during infection and evoke robust immune responses broadly in patients with O157 disease. The majority of the 223 positive clones identified earlier using pooled, adsorbed HUS-convalescent sera, reacted with each of the four individual serum samples that made up the pool, but not with a control serum sample taken from a healthy pediatric patient (Tables 1, 2, 3). However, 15 ivi-proteins expressed from the backbone and four ivi-proteins expressed from OIs reacted differentially with individual patient serum. We are currently investigating via PCR whether the failure of individual patients to respond to a particular ivi-protein is attributable to heterogeneity of cognate isolates. Also, 22 backbone (Table 2) and two O157-specific ivi-proteins (Table 3) reacted with the control serum. We speculate that this may be due to cross-reacting antibodies in the control sera, or less likely, the presence of pre-existing antibodies to O157 proteins from prior, unrecognized infection. Studies are ongoing to compare reactivity of sera from healthy individuals, of different age groups, to the ivi-antigens.

[0104] Ivi-Proteins Expressed from OIs and pO157 were not Among the 300 O157 Proteins Most Highly Expressed During In Vitro Growth.

[0105] The central premise of IVIAT is that identified proteins are expressed during infection but not during growth under standard laboratory conditions. Proteomic analysis using ESIμLC-MS/MS confirmed that none of the 37 ivi-proteins expressed from OIs or five expressed from pO157 were among the 300 O157 proteins most highly expressed during growth in LB broth (data not shown). This was not entirely expected because many of the O157-specific proteins are reportedly expressed, at least to some degree, in vitro (McNally et al. 2001. Infect Immun 69:5107-5114). We speculate that owing to minimal expression of such proteins during in vitro culture, a mass spectrometry run of longer duration would be required for their identification.

[0106] In contrast, 18 of 181 backbone ivi-proteins were expressed sufficiently in LB broth for detection by proteomic analysis (Table 5). Of these 18 backbone ivi-proteins expressed in vitro, 12 were identified by ESIμLC-MS/MS during the course of both runs; six were weakly expressed in one run only, at a percent protein abundance ranging from 0.09 to 0.04 (Table 5). We hypothesize that these 18 proteins are expressed at higher levels during human infection than during growth in LB broth and attribute their identification by IVIAT to the fact that low-level protein expression during in vitro growth may not effectively deplete HUS-convalescent sera of antibodies against these ivi-proteins during absorption.

[0107] A graphical representation of the locations of ivi-genes on the O157 chromosome is shown in FIG. 3 and on the pO157 plasmid in FIG. 4. Ivi-genes included 181 of 4029 (4.5%) open reading frames (ORFs) in the backbone, 37 of 1387 (2.7%) ORFs in the OIs, and 5 of 100 (5%) ORFs in pO157 sequences of the EDL933 genome (Perna et al. 2001. Nature 409:529-533).

[0108] The 181 backbone-specific ivi-genes were distributed uniformly on the O157 chromosome; however, several of the 37 OI-specific ivi-genes appeared to localize in three discrete OI groups, (a group contained four or more OIs, with each separated by five or fewer intervening OIs). Although in most cases only one ivi-gene mapped to an individual OI, there were instances where multiple ivi-genes (two or more) mapped within the same OI (OI #36, OI #52, OI #57, OI #89, OI #93). The five ivi-genes that mapped to pO157 are also shown in FIG. 4.

[0109] The apparent grouping of OIs expressing ivi-proteins raises the possibility that ivi-proteins (and other proteins) expressed from OIs within a particular group might act in concert to optimally influence a specific function. Particularly interesting was that group I, which included OI #148 expressing the adhesin, intimin-γ, also included OI #145 expressing a glycosyltransferase, WaaD, one of the many enzymes involved in the biosynthesis of LPS core oligosaccharide. The fact that WaaD is expressed from the same operon as WaaI (another enzyme that functions in LPS core oligosaccharide biosynthesis), and that O157 waaI deletion mutants are hyper-adherent to cultured intestinal epithelial cells (Torres and Kaper 2003. Infect Immun 71:4985-4995) may suggest that during human infection, intimin-γ, LPS of O157 (and possibly other ivi and non ivi-proteins, expressed from OIs within this group) might act in concert to modulate adherence of O157 to human epithelial cells. It will be interesting to test this hypothesis experimentally and also to determine whether proteins in OI groups II and III might be functionally related as well.

[0110] In conclusion, IVIAT identified 223 O157 proteins expressed in vivo during human infection, several of which were unique to this study. Although IVIAT for O157 was validated by the identification of previously identified potential O157 virulence factors, prior infection with O157 does not necessarily produce full protection from subsequent re-infection (Besser et al. 1999. Annu Rev Med 50:355-367). This may reflect suboptimal antibody responses to protective antigens, and we hypothesize that robust expression and optimal delivery of relevant ivi-proteins (and other O157 antigens) to the mucosal immune system might engender more protective immune responses. Preliminary experiments demonstrated that all of the 223 reactive clones also reacted with pooled, adsorbed sera from patients who had recovered from hemorrhagic colitis (data not shown) suggesting that similar pathogenic mechanisms may be operating in this illness and in HUS.

[0111] IVIAT provides a “snap shot” of O157 protein expression during infection, and a glimpse of the possible mechanisms by which this pathogen might counter host defenses, and adapt and establish itself within the human gut to cause disease. Studies directed toward the characterization of the role of ivi-proteins in O157 pathogenesis are currently underway. The identification of ivi-genes unique to diverse O157 isolates, as well as non-O157 EHEC, and Shiga toxigenic E. coli (STEC) that lack LEE but are pathogenic to humans, and of ivi-genes shared between EHEC and EPEC, augurs well for the future development of diagnostic tests for EHEC and STEC infection, as well as the development of common drugs and vaccines against EHEC, STEC and EPEC.

### Example 2

### E. coli Antigens Identified in Cattle

[0112] The primary route for human infection with E. coli is through contaminated beef products. Therefore an effective means for reducing E. coli disease in humans is the vaccination of cattle against E. coli. Using PELS, described herein, we have identified immunogenic E. coli proteins that are expressed in cattle.

[0113] Proteins constituting microbial immunomes (the subset of microbial antigens that elicit subject immune responses) have excellent diagnostic, prophylactic and therapeutic potential, since a subset of such immunogenic proteins is part of the repertoire of microbial factors that function to help pathogens counter subject defenses, facilitate niche-adaptation and survive and replicate in these subjects. Methodologies to rapidly identify such protein targets facilitate exploitation of microbial genome sequence data, and expedite the development of novel management strategies against infectious diseases.

[0114] Traditional methodologies for proteome-wide identification of immunogenic microbial proteins (IMPs) involve screening microbial recombinant genomic expression libraries in plasmid/phage expression vectors and laboratory host strains, with sera from colonized or infected subjects. However, colony immunoscreening and in vivo-induced antigen technology (IVIAT) (Rollins et al. 2005. Cell Microbiol 7:1-9), a variation of colony immunoscreening that defines only partial immunoproteomes, and bacterial surface display coupled with magnetic cell sorting (Etz et al. 2002. Proc Nat Acad Sci USA 99:6573-6578) are laborious, and require several months or more for definitive IMP-identification. Immunoproteomics of pathogens cultured in vitro under either standard laboratory conditions or those that attempt to mimic the host environment are also popular; however, pathogens cultured in vitro might not express the entire spectrum of virulence proteins. In view of the challenging task of accurately reproducing the host environment, such approaches might overlook those immunogenic virulence proteins that are expressed exclusively in response to host environmental cues, and contribute significantly to pathogenicity (Mahan et al. 2000. Annu Rev Genet. 34:139-164). Although these limitations may be circumvented by immunoproteomics of pathogens isolated directly from either biological specimens or subject anatomical sites of infection, consistent recovery of sufficient numbers of suitable organisms for analysis presents a significant challenge (Xu et al. 2003. Proc Nat Acad Sci USA 100: 1286-1291). Protein microarray/chip-technology has tremendous potential for rapid, global definition of IMPS, but is constrained by bottlenecks in proteome-scale purification of microbial proteins, and currently permits immunological characterization of only a partial proteome (Li et al. 2005. Infect Immun 73:3734-3739). Newer formats such as nucleic acid programmable protein arrays (NAPPA) (Ramachandran et al. 2004. Science 305:86-90) are still experimental, and neither NAPPA nor antibody arrays/protein chips utilizing surface enhanced laser desorption/ionization time of flight (SELDI-TOF) mass spectrometry for antigen identification (Hess et al. 2005. J Chromatogr B Analyt Technol Biomed Life Sci 815:65-75) have been demonstrated to rapidly define microbial immunoproteomes.

[0115] To rapidly identify proteins comprising microbial immunomes, we have developed a novel technique, PELS, which couples standard recombinant DNA and immunochemistry techniques with proteomics. The principle of PELS is outlined in FIG. 5, and involves capture of recombinant proteins expressed from an inducible, microbial genomic DNA expression library using polyclonal antibodies (PAbs) affinity-purified from acute/convalescent sera of infected subjects or sera from reservoirs colonized by the cognate pathogen (bait PAbs), coupled to a solid support. Proteins captured by the bait PAbs are subjected to 1D SDS PAGE ESI nano LC-MS/MS (GeLC-MS/MS), and identified via SEAQUEST database searching (Steen and Mann 2004. Nat Rev Mol Cell Biol 5:699-711) (FIG. 5). The entire process, from recombinant genomic expression library construction to definitive protein identification, is accomplished in only three weeks without biases inherent to manual screening. To our knowledge, this is the first application of proteomics for rapid, global identification of IMPs from among proteins expressed from genes on inserts within recombinant clones comprising microbial genomic expression DNA libraries.

### Materials and Methods

[0116] Recombinant DNA Methods and Proteomic Analysis.

[0117] Isolation of plasmid DNA, restriction digestions, and agarose gel electrophoresis were performed using standard procedures (Sambrookand Russel 2001. A Laboratory Manual. (Cold Spring Harbor Laboratory Press, New York). Enzymes for restriction digestions, DNA modifications and ligations were procured from New England Biolabs, Beverly, Mass. Oligonucleotides for PCR were obtained from the DNA Synthesis Core Facility, Department of Molecular Biology, Massachusetts General Hospital. Plasmids were electroporated into E. coli DH5α or BL21(DE3) using a Gene Pulser (Bio-Rad Laboratories, Richmond, Calif.) as instructed by the manufacturer. Electroporation conditions were 2,500 V at 25-mF capacitance, producing time constants of 4.8 to 4.9 ms. Proteomic analysis, namely, 1D SDS-PAGE nano capillary high-performance liquid chromatography combined with electrospray ionization tandem mass spectrometry (1D SDS-PAGE ESI nano LC-MS/MS or GeLC-MS/MS), was performed at the Harvard Partners Center for Genetics and Genomics, Cambridge, Mass.

[0118] Construction of an Inducible, Escherichia coli O157:H7 (O157) Genomic DNA Expression Library Comprising of Clones Containing DNA Inserts of Optimal Size (“Optimized” O157 Expression Library).

[0119] We generated an O157 genomic DNA expression library as described above, using genomic DNA isolated from the O157 strain 43894 (an isolate from a human patient with hemorrhagic colitis in the United States) in the pET-30abc series of expression vectors (Novagen, Madison, Wis.). Vector and insert DNA in the size range of 0.5 to 3.0 kbp were prepared as described previously (Ibid). Because accuracy of protein identification using tandem MS/MS data and SEQUEST database searching increases with the number of peptides generated following trypsin digestion of the cognate protein (Steen and Mann 2004. Nat Rev Mol Cell Biol 5:699-711), we sought to preferentially ligate insert DNA fragments that were larger than the average size of ORFs in this pathogen. The rationale was that larger DNA fragments were more likely to include genes encoding full-length or near full-length recombinant proteins containing potentially a larger number of recognition sites for cleavage by trypsin, such that multiple peptide fragments resulting from trypsin cleavage of such proteins might facilitate robust protein identification. We accomplished this by performing multiple ligation reactions, with each containing a different mole ratio of insert to vector. Each ligation reaction was then used to transform competent E. coli DH5α via electroporation according to standard protocols (Sambrookand Russel 2001. A Laboratory Manual. (Cold Spring Harbor Laboratory Press, New York). To minimize overrepresentation of sister clones in the O157 expression library, transformants were directly plated onto LB plates supplemented with 50 μg/ml of Kan (LB-Kan) without allowing for phenotypic expression, and incubated overnight at 37° C. To determine both the percentage of transformants containing inserts as well as the insert size, 100 colonies were randomly picked from each O157 expression library, and analyzed by colony PCR using vector-specific primers. Greater than 90% of all transformants examined contained inserts, and >80% of clones of one O157 expression library included inserts that exceeded 1.7 kbp in size. Recombinant clones comprising this particular O157 expression library were scraped off LB-Kan plates, plasmid DNA was isolated using the QIAprep Spin Miniprep Kit (Qiagen Sciences, MD), and used to transform electrocompetent E. coli BL21(DE3) (Novagen), the recommended expression host, and plated as described above. The resultant O157 expression library comprised >10⁵ recombinant clones. Given the genome sizes of the sequenced O157 strains EDL933 (Perna et al. 2001. Nature 409:529-533), and Sakai (Hayashi et al. 2001. DNA Res 8:11-22), and that the average size of open reading frames (ORFs) in these strains is 1 kbp (Ohnishi et al. 1999. DNA Res 6:361-368), we concluded that this expression library, comprising of recombinant clones containing inserts of optimal size (referred to herein as the “optimized” O157 expression library), was adequate for defining components of the O157 immunoproteome (Stephenson 2005. A Guide to Mathematics in the Laboratory. (Academic Press, Massachusetts).

[0120] Expression of the Optimized O157 Expression Library and Preparation of Cell-Lysate and Pellet Fractions Containing Recombinant Proteins for Immunoaffinity Capture.

[0121] To expedite sample preparation, and circumvent laborious experimentation to define the inducer concentration and post induction growth conditions (such as incubation temperature and duration of growth after induction) that facilitated recombinant O157 protein expression in a form that permitted optimal capture by polyclonal antibodies (PAbs) affinity purified from pooled hyperimmune cattle sera (referred to herein as “bait” PAbs), and coupled to HiTrap NHS-activated HPcolumns (see below), several batches of the “optimized” O157 expression library were cultured simultaneously at 37° C. to an initial OD₆₀₀ of 0.6. Cultures were then induced with 0.25 mM, 0.5 mM, 1 mM or 2.0 mm isopropyl-β-D-thiogalactopyranoside (IPTG), and incubated at 25° C., 30° C., or 37° C. for either 5 h or overnight. Cultures were pooled, centrifuged at 7,000 rpm for 10 min at 4° C. to harvest cell pellets, which were then washed 3× with chilled, sterile PBS (pH 7.4). Complete® protease inhibitor cocktail (Roche Diagnostics, Indianapolis, Ind.) was added to twice the concentration recommended by the manufacturer, after which cells were lysed by three cycles of freeze-thaw. Lysed cells were resuspended in 2 ml chilled PBS, microcentrifuged at maximum speed for 10 min, and supernatant (lysate) fractions decanted into fresh tubes. Pellet fractions were resuspended in 2 ml of PBS containing 2×“Complete” protease inhibitor cocktail (Roche), and 0.2% (final concentration) of the nonionic detergent, n-octyl-β-D-glucopyranoside (NOG), was added to solubilize membrane proteins. Both the lysate and pellet fractions containing recombinant O157 proteins were stored at −70° C. until used.

[0122] Coupling of Bait PAbs to HiTrap NHS-Activated HP Columns.

[0123] Prior to coupling, hyperimmune cattle sera against diverse O157 strains was generated, and evaluated for reactivity against previously identified O157 antigens (Supplemental material). Polyclonal antibodies were affinity-purified from pooled, hyperimmune cattle sera (Bait PAbs) as detailed herein. Affinity-purified Bait PAb fractions were pooled together and dialyzed overnight against PBS (pH 7.4) at 4° C., and then for 4 h against coupling buffer consisting of 0.2 M NaHCO3, 0.5 M NaCl (pH 8.3) using a dialysis membrane with a molecular weight cut off of 3500. Coupling of bait PAbs via amine groups was done as instructed by the manufacturer with minor modifications. Following removal of isopropanol, HiTrap NHS-activated columns were equilibrated with ten column volumes of coupling buffer. Pooled, bait IgG PAbs were slowly loaded on the column using a syringe and then recirculated through the column for 30 min at room temperature by attaching another syringe to the outlet. Active groups that did not couple to the ligand were quenched with 10 ml of 1 M Tris (hydroxymethyl)aminomethane (pH 9.0), and nonspecifically bound PAbs were eluted with 10 ml of 1 M acetic acid. Columns with immobilized bait PAbs (charged columns) were then rinsed with 10 ml of deionized water to remove the quencher and the eluant.

[0124] Capture of Recombinant O157 Proteins.

[0125] “Charged” columns were equilibrated with ten column volumes of binding buffer consisting of PBS (pH 7.4), 0.2% NOG. Cell lysates and pellet fractions containing recombinant O157 proteins from the previous step were diluted with PBS-0.2% NOG containing 2× concentration of “Complete” protease inhibitor cocktail (Roche Diagnostics) in 20 ml, and then loaded via a syringe separately onto the charged columns, at a flow rate dictated by gravity (˜0.75-1 ml/min). Following a rinse with 20 volumes of loading buffer to remove loosely bound proteins, specifically captured recombinant proteins were eluted with 10 ml of 1 M acetic acid directly into 15 ml Falcon tubes containing 500 μl of ammonium hydroxide. This process was repeated three times to maximize yield of captured recombinant O157 proteins. Nonspecific adsorption of recombinant O157 proteins to the column matrix was assessed by passing “optimized” O157 expression library lysate and pellet fractions of cells of the O157 expression library through “uncharged” columns (HiTrap NHS-activated HP columns not coupled to bait PAbs), with quenched active groups. Specificity of capture and lack of nonspecific adsorption was confirmed by visualizing recombinant O157 proteins by fractionation of elutions from “charged” and “uncharged” columns on SDS-PAGE gels and subsequent staining (FIG. 6A-D).

[0126] Proteomic Analysis of Elutions from “Charged” and “Uncharged” Columns Using 1D SDS Page ESI Nano LC-MS/MS (GeLC-MS/MS).

[0127] Elutions from charged and uncharged columns were subjected to 1D SDS PAGE followed by nanocapillary high-performance liquid chromatography combined with electrospray ionization tandem mass spectrometry (ESI nano LC-MS/MS) (GeLC-MS/MS; see below) at the Harvard Partners Center for Genetics and Genomics, Cambridge, Mass. The advantages of GeLC-MS/MS over LC-MS/MS have been well documented (Steen and Mann 2004. Nat Rev Mol Cell Biol 5:699-711). In preparation for 1D SDS-PAGE, elutions were concentrated using spin filters (MW cutoff 5000 Daltons) (Vivascience Inc., Edgewood, N.Y.), and reduced by incubation in 250 μl of 8M urea/100 mM ammonium bicarbonate/1% SDS/10 mM DTT at 37° C. for 1 h. Following a further incubation at room temperature for 20 min, each sample was alkylated by the addition of 15 μl of 500 mM iodoacetamide, and incubation at room temperature in the dark for 60 min. Alkylation was then quenched with 3 μl of 2M DTT to each sample. Following the addition of 150 μl of SDS-PAGE loading buffer per tube, each sample was centrifuged at 14,000 rpm for 10 min at room temperature, and 400 μl of each sample was fractionated on a 1D SDS-PAGE Tris-Glycine 8-16% gradient (Invitrogen) for 2.5 h at 125 volts, 20 mA and 8 Watts. Gels were alternatively shrunk for 12 h by the addition of 500 ml of 50% methanol, 5% acetic acid, and then allowed to swell up for 1 h by the addition of 500 ml of deionized water for 60 min on a rotary shaker. Gels were then stained with SimplyBlue Safe Stain (Invitrogen) for 14-16 h on a rotary shaker, imaged and sliced horizontally (using molecular weight standards as a guide) into multiple sections of equal size, and processed as described below.

[0128] In-Gel Digestion/Peptide Extraction.

[0129] Gel sections from the previous step were placed in 2.0 ml tubes (Axygen, Union city, Calif.), and moved into a dual isolation biosafety cabinet. Gel pieces were destained with 2 washes of 50% methanol, 5% acetic acid, and rinsed with three alternating washes of 100 mM ammonium bicarbonate and 100% acetonitrile to remove the destain solution. Following removal of the acetonitrile after the final wash, gel slices were dried for 10 minutes in a speedvac. Tubes containing the dried gel sections were placed on ice, and 200 μL of Promega sequencing grade trypsin at a concentration of 6.6 μg/ml in 50 mM ammonium bicarbonate was added to each sample. The gel pieces were allowed to swell for 60 minutes on ice, after which the tubes were capped and incubated at 37° C. for 20 hours. Peptides were extracted with two washes of 500 μL of 50 mM ammonium bicarbonate and two washes of 500 μL of 50% acetonitrile, 0.1% formic acid. All extracts were frozen at −80° C., lyophilized to dryness, and redissolved in 60 μl of 5% acetonitrile, 0.1% formic acid. Samples were then loaded onto a 96 well plate for mass spectrometry (MS) analysis (see below).

[0130] Mass Spectrometry (MS).

[0131] Samples for MS were run on either an LCQ DECA XP (LCQ) plus Proteome X workstation as described above, or on a linear ion trap-Fourier transform mass spectrometer (LTQ-FT) from Thermo Finnigan. For each run using the LCQ, 10 μL of each reconstituted sample was injected with a Famos Autosampler, while the separation was done on a 75 μm (inner diameter) by 20 cm column packed with C18 media running at a flow rate of 250 nanoliters (nL) per minute provided from a Surveyor MS pump with a flow splitter with a gradient of 5-72% water 0.1% formic acid, and 5% acetonitrile over the course of 240 min (4.0 hour run). For each run using the LTQ-FT, 10 μL of each reconstituted sample was injected with a Famos Autosampler, while the separation was done on a 75 μm (inner diameter)×20 cm column packed with C18 media running at a 225 nL/minute flow rate provided from a Surveyor MS pump with a flow splitter with a gradient of 5-60% water 0.1% formic acid, acetonitrile 0.1% formic acid over the course of 120 minutes (150 rain total run). Between each set of samples, 2.5 h standards of a 5 Angio mix of peptides (Michrom BioResources) were run to ascertain column performance, and observe any potential carryover that might have occurred. The LCQ was run in a top five configuration with one MS scan and five MS/MS scans. Dynamic exclusion was set to 1 with a limit of 30 seconds. The LTQ-FT was run in a top nine configuration, with one MS 200K resolution full scan and nine MS/MS scans. Dynamic exclusion was set to 1 with a limit of 180 seconds with early expiration set to 2 full scans.

[0132] Peptide identifications were made using SEQUEST (Thermo Finnigan) through the Bioworks Browser 3.2. Sequential database searches were performed using the E. coli O157:H7 strain EDL933 FASTA database from European Bioinformatics Institute using static carbamidomethyl-modified cysteines and differential oxidized methionines. A reverse E. coli O157:H7 strain EDL933 FASTA database was spiked in to provide noise and determine validity of peptide hits. In this fashion, the statistical relevance of all the data could be determined in a sample and mass spectrometer independent manner (Peng et al. 2003. J Proteome Res 2:43-50). LCQ data was searched with a 2 Dalton window on the MS precursor with 0.8 Dalton on the fragment ions, while the FT data was searched at 5 ppm for the precursor ion and 0.5Da on the fragment ions. Peptide score cutoff values were chosen at cross-correlation values (Xcorr) of 1.8 for singly charged ions, 2.5 for doubly charged ions, and 3.0 for triply charged ions, along with delta rank scoring preliminary cutoff (deltaCN) values of 0.1, peptide probability values of 1.00 E-3 and cross-correlation normalized values (RSP) of <10. The cross-correlation values chosen for each peptide assured a high confidence match for the different charge states, while the deltaCN ensured the uniqueness of the peptide hit. The RSP value of 1 was used on single peptide hits to ensure that the peptide matched the top hit in the preliminary scoring. At these peptide filter values, very few single peptide reverse database hits were observed, allowing us to place a higher confidence on the few single peptide protein identifications. Single hit proteins, were also manually validated to ensure relevance.

[0133] Cellular localization and putative functions of hypothetical proteins identified by querying the E. coli O157:H7 strain EDL933 FASTA database at European Bioinformatics Institute with tandem MS data were determined using bioinformatics as follows: (i) cellular localization of such proteins was determined using the PSORTb v.2.0/PSLpred and PSORTdb databases; (ii) extracytoplasmic location was confirmed by examining the N-terminus of amino acid sequences of cognate proteins from the O157 strain EDL 933 database from The Institute for Genome Research, for the presence of a signal sequence using the program SignalP 3.0, and (iii) putative functions were designated using the NCBI Conserved Domain Database (CDD).

### Results and Discussion

[0134] Generation of Hyper-Immune Bovine Sera.

[0135] Hyperimmune sera were obtained from cattle experimentally inoculated with E. coli O157 strains of both cattle and human origin (Torres and Kaper 2003. Infect Immun 71:4985-4995), which included the strain EDL933, one of the sequenced O157 strains (Hayashi et al. 2001. DNA Res 8:11-22; Torres and Kaper 2003. Infect Immun 71:4985-4995). The rationale was that exposure of these cattle to diverse O157 strains of both lineage I and II (Tarr et al. 2000. Infect Immun 68:1400-1) might engender antibody responses against a wider variety of protein antigens expressed in the gastrointestinal tract (GIT) of cattle rendering the hyperimmune sera optimal for profiling the immunoproteome of this organism in the bovine reservoir. Cattle were first confirmed to be negative for O157 colonization using highly sensitive recto-anal swab culture techniques (Torres and Kaper 2003. Infect Immun 71:4985-4995), and then inoculated once orally with 10¹⁰ CFU of each strain (Ibid). Serum samples, collected from nine cattle that had remained culture positive for up to two months (Ibid) following experimental inoculation, demonstrated high titers of anti-O157 lipopolysaccharide (LPS) antibodies (Ibid). Preimmune sera were also collected from the same animals prior to inoculation.

[0136] Preliminary Evaluation of Reactivity of Pooled Hyperimmune Sera.

[0137] We assessed the quality of pooled hyperimmune sera, by reacting them with previously identified, secreted O157 proteins encoded in the locus of enterocyte effacement (LEE) (Sambrookand Russel 2001. A Laboratory Manual. (Cold Spring Harbor Laboratory Press, New York). Cattle immunized with such proteins, including those expressed from the LEE, reportedly show decreased shedding of O157 (Ibid). We first confirmed reactivity of hyper-immune cattle sera with O157 lipopolysaccharide (LPS) purified in our laboratory using a protocol described herein (FIG. 6 a and b). We then amplified genes encoding full-length EspB from O157 strain EDL933 (test), and PilA from Vibrio cholerae E1 Tor N16961 (control), and cloned them into the expression vector, pET-30b (Novagen, Inc., Madison, Wis.) under control of the phage T7 promoter. Following confirmation of in frame cloning via gene sequencing, we transformed plasmids into E. coli BL21(DE3). Recombinant clones were induced with isopropyl-β-D-thiogalactopyranoside (IPTG) and probed in a colony immunoblot assay with pooled, hyper-immune cattle sera adsorbed against purified O157 LPS, as described previously by our group (Perna et al. 2001. Nature 409:529-533). None of the above recombinant clones reacted with pooled, pre-immune cattle sera.

[0138] Affinity-Purification of Pabs from Hyperimmune Sera.

[0139] Prior to affinity purification, we pooled hyperimmune sera from nine cattle to compensate for variations in individual immune responses and identify a wider complement of O157 proteins expressed within the GIT of bovine reservoirs. PAbs from 1 ml of pooled hyperimmune cattle sera were purified using HiTrap Protein G HP (5 ml) columns (Amersham Biosciences, Piscataway, N.J.), as recommended by the manufacturer with a few modifications. Briefly, pooled sera were diluted 1:4 in binding buffer (0.02 M Sodium phosphate buffer, pH 7.0), and then loaded using a syringe onto a protein G column equilibrated with ten volumes of binding buffer. Protein G binds all IgG subclasses but not other immunoglobulin isotypes (Johnson et al. 2005. Infect Immun 73:965-971). Following a wash with ten volumes of binding buffer, bound IgG PAbs were eluted with 4 ml of elution buffer (0.1 M Glycine, pH 2.7), directly into five tubes each containing 200 μl of 1M Tris-HCl, pH 9.0. Affinity-purified IgG PAbs (bait PAbs) were quantified using a nomograph (Dziva et al. 2004. Microbiol. 150:3631-3645) and prepared for coupling.

[0140] The PELS-Identified O157 Immunoproteome in Bovine Reservoirs.

[0141] In order to validate PELS (FIG. 5), we sought to rapidly define a protein-subset constituting the O157 immunome in bovine reservoirs as a vaccine for elimination of this pathogen from the gastrointestinal tracts (GIT) of cattle, a principal source of human infection. For this, we constructed and induced recombinant protein expression from genes on inserts within clones comprising an “optimized” O157 expression library using a range of IPTG concentrations, followed by growth at different incubation temperatures for varying time intervals. To capture recombinant proteins contained in cell-lysate and pellet fractions of library clones, we affinity-purified bait PAbs from pooled, hyperimmune cattle sera previously generated against diverse O157 strains following confirmation of reactivity of this hyperimmune cattle serum pool against previously identified O157 antigens (FIGS. 7A and B). We then “charged” HiTrap NHS-activated columns by coupling to bait PAbs, after which pooled cell-lysate and pellet fractions from above were applied separately to “charged” columns. Specifically captured O157 recombinant proteins were identified by subjecting pooled elution-fractions to GeLC-MS/MS and SEQUEST database searching (Tables 6 and 7).

[0142] PELS identified 207 proteins, comprising 3.8% of the proteome of the sequenced O157 strain EDL933 (Perna et al. 2001. Nature 409:529-533), as components of the immunome of this organism in bovine reservoirs (Tables 6 and 7). PELS was strongly validated by the fact that 35 of 207 (17%) proteins were also part of the O157 immunome in humans convalescing from extraintestinal O157 disease. Further validation of PELS came from identification of previously identified adhesins of O157 (Torres and Kaper 2003. Infect Immun 71:4985-4995; Tarr et al. 2000. Infect Immun 68:1400-1) and of other pathogens (Johnson et al. 2005. Infect Immun 73:965-971) (Table 6), as well as several bovine colonization factors (Dziva et al. 2004. Microbiol. 150:3631-3645) (Table 7), which was consistent with the fact that this human pathogen only colonizes the GIT of cattle, but does not cause disease in these reservoirs. As in the earlier report on the O157 immunome in humans identified by IVIAT, PELS identified outer membrane components of high-affinity iron transport, bacteriophage proteins, biosynthetic and metabolic enzymes, and proteins involved in energy generation and anaerobic respiration, in accordance with requirements for adaptation to the host environment, in vivo growth and survival. PELS also identified several hypothetical and unknown proteins, including those unique to this study (Table 7).

### Example 3

### Identification of Antigens from Other Pathogens

[0143] The PELS method described herein (Example 2), is useful for identifying immunogenic pathogen-derived proteins from virtually any pathogenic organism. Examples of pathogenic organisms are bacteria, fungi, viruses, annelids, nematodes, platyhelminthes, and protozoans. Examples of pathogenic bacteria include, without limitation, Aerobacter, Aeromonas, Acinetobacter, Agrobacterium, Bacillus, Bacteroides, Bartonella, Bortella, Brucella, Calymmatobacterium, Campylobacter, Citrobacter, Clostridium, Cornyebacterium, Enterobacter, Enterococcus, Escherichia, Francisella, Haemophilus, Hafnia, Helicobacter, Klebsiella, Legionella, Listeria, Morganella, Moraxella, Proteus, Providencia, Pseudomonas, Salmonella, Serratia, Shigella, Staphylococcus, Streptococcus, Treponema, Xanthomonas, Vibrio, and Yersinia.

[0144] In the example of M. tuberculosis, the method of the invention is used to identify immunogenic proteins. A recombinant DNA expression library representing the entire genome of M. tuberculosis is used to produce recombinant proteins. These proteins are contacted with polyclonal antibodies that are purified from the sera of human subjects infected with M. tuberculosis. Proteins that form complexes with these antibodies are isolated, and the identity of the immunogenic proteins is determined through GeLC-MS/MS and SEQUEST database searching.

[0145] Examples of pathogenic fungi include, without limitation, Alternaria, Aspergillus, Basidiobolus, Bipolaris, Blastoschizomyces, Candida, Candida albicans, Candida krusei, Candida glabrata (formerly called Torulopsis glabrata), Candida parapsilosis, Candida tropicalis, Candida pseudotropicalis, Candida guilliermondii, Candida dubliniensis, and Candida lusitaniae, Coccidioides, Cladophialophora, Cryptococcus, Cunninghamella, Curvularia, Exophiala, Fonsecaea, Histoplasma, Madurella, Malassezia, Plastomyces, Rhodotorula, Scedosporium, Scopulariopsis, Sporobolomyces, Tinea, and Trichosporon.

### Example 4

### Cattle Vaccination

[0146] Proteins identified in any of the above screens (Examples 1-3) are evaluated as vaccines for prevention of E. coli O157:H7 colonization of the bovine gastrointestinal tract, including the recto-anal junction (RAJ) (Naylor et al. 2003. Infect Immun 71:1505-1512) according to standard methods known in the field. The immunogenic composition of such an experimental vaccine comprise a single or a combination of proteins that are administered as either a protein or a DNA vaccine.

[0147] In preparation for a protein-based vaccine, any of the proteins described herein (Tables 2, 3, 7, and SEQ ID NOs: 1-340) are purified using standard techniques. Various formulations of immunogens comprising the vaccine are evaluated in cattle with and without adjuvants (Harlow and Lane 1988. Cold Spring Harbor Laboratory Press, Cold Spring Harbor, N.Y.). In order to determine the optimal method of delivery, the protein vaccine is administered via diverse routes of immunization, including subcutaneous, intradermal, and intramuscular. Various formulations of the protein vaccine may also be administered using transcutaneous immunization (TCI) (Glenn et al. 1999. Infect. Immun 67:1100-1106) in conjunction with ADP-ribosylating toxins and other adjuvants (Scharton-Kersten et al. 2000. Infect Immun 68:5306-5313) for induction of robust mucosal and systemic immune responses.

[0148] In preparation for a plasmid DNA (pDNA) based vaccine, the gene encoding the entire open reading frame of the cognate protein will amplified from E. coli O157:H7 genomic DNA via PCR, its nucleic acid sequence confirmed, and subsequently cloned into suitable pDNA vaccine vectors. Following confirmation of protein expression by SDS-PAGE-coomassie blue staining of extracts of cultured mammalian cells, various formulations of the pDNA-based vaccine will be evaluated with and without adjuvants in cattle. As for protein-based experimental vaccines, the pDNA-based genetic vaccine will be administered via topical skin application, subcutaneous, intradermal, intramuscular routes. These vaccines will also be administered using a biolistic device such as a gene gun (Fynan et al. 1993. Proc Nat Acad Sci USA 90:11478; Johnston and Tang 1994. Methods Cell Biol 43 Pt A:353-65).

[0149] Cattle are primed and boosted (immunized) with the protein or pDNA-based experimental vaccine alone or may be primed with one experimental vaccine and boosted with the other. Cattle primed on Day 0 will be boosted three times at 14-day intervals. Pre-immune sera will be collected on Day 0, and on days 14, 28, 42, for measurement of immune responses. Cattle will be challenged by oral inoculation of >10⁹ each of a diverse collection E. coli O157:H7 at starting from 14 days after the third booster. The efficacy of the experimental vaccine will be determined by decreased duration of shedding in stools (relative to that in unimmunized controls), and an absence of colonization of the RAJ of experimentally inoculated, immunized cattle (Naylor et al. 2003. Infect Immun 71:1505-1512).

### Example 5

### Additional Embodiments

[0150] Based on the nucleotide and amino acid sequences described herein, the isolation of additional coding sequences of virulence factors is made possible using standard strategies and techniques that are well known in the art. Any pathogenic cell can serve as the nucleic acid source for the molecular cloning of such a virulence gene, and these sequences are identified as ones encoding a protein exhibiting pathogenicity-associated structures, properties, or activities.

[0151] In one particular example of such an isolation technique, any one of the nucleotide sequences described herein may be used, together with conventional screening methods of nucleic acid hybridization screening. Such hybridization techniques and screening procedures are well known to those skilled in the art. In one particular example, all or part of any one of the nucleotide sequences identified in Tables 2, 3, or 7 and SEQ ID NOs: 1-340, may be used as a probe to screen a recombinant DNA library for genes having sequence identity to such genes. Hybridizing sequences are detected by plaque or colony hybridization according to standard methods.

[0152] Alternatively, using all or a portion of the amino acid sequence of any one of the polypeptides identified in Tables 2, 3, or 7 and SEQ ID NOs: 1-340, one may readily design specific oligonucleotide probes, including degenerate oligonucleotide probes (i.e., a mixture of all possible coding sequences for a given amino acid sequence). These oligonucleotides may be based upon the sequence of either DNA strand and any appropriate portion of the sequence of the polypeptide. General methods for designing and preparing such probes are known in the art. These oligonucleotides are useful for gene isolation, either through their use as probes capable of hybridizing to complementary sequences or as primers for various amplification techniques, for example, polymerase chain reaction (PCR) cloning strategies. If desired, a combination of different, detectably-labelled oligonucleotide probes may be used for the screening of a recombinant DNA library. Such libraries are prepared according to methods well known in the art.

[0153] As discussed above, sequence-specific oligonucleotides may also be used as primers in amplification cloning strategies, for example, using PCR. PCR methods are well known in the art and are described. Primers are optionally designed to allow cloning of the amplified product into a suitable vector, for example, by including appropriate restriction sites at the 5′ and 3′ ends of the amplified fragment (as described herein). If desired, nucleotide sequences may be isolated using the PCR “RACE” technique, or Rapid Amplification of cDNA Ends. By this method, oligonucleotide primers based on a desired sequence are oriented in the 3′ and 5′ directions and are used to generate overlapping PCR fragments. These overlapping 3′- and 5′-end RACE products are combined to produce an intact full-length cDNA.

[0154] Partial virulence sequences, e.g., sequence tags, are also useful as hybridization probes for identifying full-length sequences, as well as for screening databases for identifying previously unidentified related virulence genes.

[0155] Confirmation of a sequence's relatedness to a pathogenicity polypeptide may be accomplished by a variety of conventional methods including, but not limited to, functional complementation assays and sequence comparison of the gene and its expressed product. In addition, the activity of the gene product may be evaluated according to any of the techniques described herein, for example, the functional or immunological properties of its encoded product.

[0156] Once an appropriate sequence is identified, it is cloned according to standard methods and may be used, for example, for screening compounds that reduce the virulence of a pathogen.

### Polypeptide Expression

[0157] In general, polypeptides of the invention may be produced by transformation of a suitable host cell with all or part of a polypeptide-encoding nucleic acid molecule or fragment thereof in a suitable expression vehicle.

[0158] Those skilled in the field of molecular biology will understand that any of a wide variety of expression systems may be used to provide the recombinant protein. The precise host cell used is not critical to the invention. A polypeptide of the invention may be produced in a prokaryotic host (e.g., E. coli) or in a eukaryotic host (e.g., Saccharomyces cerevisiae, insect cells, e.g., Sf21 cells, or mammalian cells, e.g., NIH 3T3, HeLa, or preferably COS cells). Such cells are available from a wide range of sources (e.g., the American Type Culture Collection, Rockland, Md.). The method of transformation or transfection and the choice of expression vehicle will depend on the host system selected. Transformation and transfection methods are standard methods; expression vehicles may be chosen from those known in the art.

[0159] One particular bacterial expression system for polypeptide production is the E. coli pET expression system (Novagen, Inc., Madison, Wis.). According to this expression system, DNA encoding a polypeptide is inserted into a pET vector in an orientation designed to allow expression. Since the gene encoding such a polypeptide is under the control of the T7 regulatory signals, expression of the polypeptide is achieved by inducing the expression of T7 RNA polymerase in the host cell. This is typically achieved using host strains which express T7 RNA polymerase in response to IPTG induction. Once produced, recombinant polypeptide is then isolated according to standard methods known in the art, for example, those described herein.

[0160] Another bacterial expression system for polypeptide production is the pGEX expression system (Pharmacia). This system employs a GST gene fusion system which is designed for high-level expression of genes or gene fragments as fusion proteins with rapid purification and recovery of functional gene products. The protein of interest is fused to the carboxyl terminus of the glutathione S-transferase protein from Schistosoma japonicum and is readily purified from bacterial lysates by affinity chromatography using Glutathione Sepharose 4B. Fusion proteins can be recovered under mild conditions by elution with glutathione. Cleavage of the glutathione S-transferase domain from the fusion protein is facilitated by the presence of recognition sites for site-specific proteases upstream of this domain. For example, proteins expressed in pGEX-2T plasmids may be cleaved with thrombin; those expressed in pGEX-3× may be cleaved with factor Xa.

[0161] Once the recombinant polypeptide of the invention is expressed, it is isolated, e.g., using affinity chromatography. In one example, an antibody (e.g., produced as described herein) raised against a polypetide of the invention may be attached to a column and used to isolate the recombinant polypeptide. Lysis and fractionation of polypeptide-harboring cells prior to affinity chromatography may be performed by standard methods.

[0162] Once isolated, the recombinant protein can, if desired, be further purified, e.g., by high performance liquid chromatography (see, e.g., Fisher, Laboratory Techniques In Biochemistry And Molecular Biology, eds., Work and Burdon, Elsevier, 1980).

[0163] Polypeptides of the invention, particularly short peptide fragments, can also be produced by chemical synthesis (e.g., by the methods described in Solid Phase Peptide Synthesis, 2nd ed., 1984 The Pierce Chemical Co., Rockford, Ill.).

[0164] These general techniques of polypeptide expression and purification can also be used to produce and isolate useful peptide fragments or analogs (described herein).

### Antibodies

[0165] To generate antibodies, a coding sequence for a polypeptide of the invention may be expressed as a C-terminal fusion with glutathione S-transferase (GST) (Smith et al., 1988 Gene 67:31-40). The fusion protein is purified on glutathione-Sepharose beads, eluted with glutathione, cleaved with thrombin (at the engineered cleavage site), and purified to the degree necessary for immunization of rabbits. Primary immunizations are carried out with Freund's complete adjuvant and subsequent immunizations with Freund's incomplete adjuvant. Antibody titres are monitored by Western blot and immunoprecipitation analyses using the thrombin-cleaved protein fragment of the GST fusion protein. Immune sera are affinity purified using CNBr-Sepharose-coupled protein. Antiserum specificity is determined using a panel of unrelated GST proteins.

[0166] As an alternate or adjunct immunogen to GST fusion proteins, peptides corresponding to relatively unique immunogenic regions of a polypeptide of the invention may be generated and coupled to keyhole limpet hemocyanin (KLH) through an introduced C-terminal lysine. Antiserum to each of these peptides is similarly affinity purified on peptides conjugated to BSA, and specificity tested in ELISA and Western blots using peptide conjugates, and by Western blot and immunoprecipitation using the polypeptide expressed as a GST fusion protein.

[0167] Alternatively, monoclonal antibodies which specifically bind any one of the polypeptides of the invention are prepared according to standard hybridoma technology (see, e.g., Kohler et al., 1975 Nature 256:495; Kohler et al., 1976 Eur. J. Immunol. 6:511; Kohler et al., 1976., Eur. J. Immunol. 6:292; Hammerling et al., 1981 In Monoclonal Antibodies and T Cell Hybridomas, Elsevier, N.Y.,; Ausubel et al., supra). Once produced, monoclonal antibodies are also tested for specific recognition by Western blot or immunoprecipitation analysis (by the methods described in Ausubel et al., supra). Antibodies which specifically recognize the polypeptide of the invention are considered to be useful in the invention; such antibodies may be used, e.g., in an immunoassay. Alternatively monoclonal antibodies may be prepared using the polypeptide of the invention described above and a phage display library (Vaughan et al., 1996 Nature Biotech 14:309-314).

[0168] Preferably, antibodies of the invention are produced using fragments of the polypeptide of the invention which lie outside generally conserved regions and appear likely to be antigenic, by criteria such as high frequency of charged residues. In one specific example, such fragments are generated by standard techniques of PCR and cloned into the pGEX expression vector (Ausubel et al., supra). Fusion proteins are expressed in E. coli and purified using a glutathione agarose affinity matrix as described in Ausubel et al. (supra). To attempt to minimize the potential problems of low affinity or specificity of antisera, two or three such fusions are generated for each protein, and each fusion is injected into at least two rabbits. Antisera are raised by injections in a series, preferably including at least three booster injections.

[0169] Antibodies against any of the polypeptides described herein may be employed to treat bacterial infections.

### Screening Assays

[0170] As discussed above, we have identified a number of E. coli polypeptides that are expressed during human infection and that may therefore be used to screen for compounds that reduce the virulence of that organism, as well as other microbial pathogens. For example, the invention provides methods of screening compounds to identify those which enhance (agonist) or block (antagonist) the action of a polypeptide or the gene expression of a nucleic acid sequence of the invention. The method of screening may involve high-throughput techniques.

[0171] Any number of methods are available for carrying out such screening assays. According to one approach, candidate compounds are added at varying concentrations to the culture medium of pathogenic cells expressing one of the nucleic acid sequences of the invention. Gene expression is then measured, for example, by standard Northern blot analysis, using any appropriate fragment prepared from the nucleic acid molecule as a hybridization probe. The level of gene expression in the presence of the candidate compound is compared to the level measured in a control culture medium lacking the candidate molecule. A compound which promotes a decrease in the expression of the pathogenicity factor is considered useful in the invention; such a molecule may be used, for example, as a therapeutic to combat the pathogenicity of an infectious organism.

[0172] If desired, the effect of candidate compounds may, in the alternative, be measured at the level of polypeptide production using the same general approach and standard immunological techniques, such as Western blotting or immunoprecipitation with an antibody specific for a pathogenicity factor. For example, immunoassays may be used to detect or monitor the expression of at least one of the polypeptides of the invention in a pathogenic organism. Polyclonal or monoclonal antibodies (produced as described above) which are capable of binding to such a polypeptide may be used in any standard immunoassay format (e.g., ELISA, Western blot, or RIA assay) to measure the level of the pathogenicity polypeptide. A compound which promotes a decrease in the expression of the pathogenicity polypeptide is considered particularly useful. Again, such a molecule may be used, for example, as a therapeutic to combat the pathogenicity of an infectious organism.

[0173] Alternatively, or in addition, candidate compounds may be screened for those which specifically bind to and inhibit a pathogenicity polypeptide of the invention. The efficacy of such a candidate compound is dependent upon its ability to interact with the pathogenicity polypeptide. Such an interaction can be readily assayed using any number of standard binding techniques and functional assays. For example, a candidate compound may be tested in vitro for interaction and binding with a polypeptide of the invention and its ability to modulate pathogenicity may be assayed by any standard assays.

[0174] In one particular example, a candidate compound that binds to a pathogenicity polypeptide may be identified using a chromatography-based technique. For example, a recombinant polypeptide of the invention may be purified by standard techniques from cells engineered to express the polypeptide (e.g., those described above) and may be immobilized on a column. A solution of candidate compounds is then passed through the column, and a compound specific for the pathogenicity polypeptide is identified on the basis of its ability to bind to the pathogenicity polypeptide and be immobilized on the column. To isolate the compound, the column is washed to remove non-specifically bound molecules, and the compound of interest is then released from the column and collected. Compounds isolated by this method (or any other appropriate method) may, if desired, be further purified (e.g., by high performance liquid chromatography). In addition, these candidate compounds may be tested for their ability to render a pathogen less virulent (e.g., as described herein). Compounds isolated by this approach may also be used, for example, as therapeutics to treat or prevent the onset of a pathogenic infection, disease, or both. Compounds which are identified as binding to pathogenicity polypeptides with an affinity constant less than or equal to 10 mM are considered particularly useful in the invention.

[0175] Potential antagonists include organic molecules, peptides, peptide mimetics, polypeptides, and antibodies that bind to a nucleic acid sequence or polypeptide of the invention and thereby inhibit or extinguish its activity. Potential antagonists also include small molecules that bind to and occupy the binding site of the polypeptide thereby preventing binding to cellular binding molecules, such that normal biological activity is prevented. Other potential antagonists include antisense molecules.

[0176] Each of the DNA sequences provided herein may also be used in the discovery and development of antipathogenic compounds (e.g., antibiotics). The encoded protein, upon expression, can be used as a target for the screening of antibacterial drugs. Additionally, the DNA sequences encoding the amino terminal regions of the encoded protein or Shine-Delgarno or other translation facilitating sequences of the respective mRNA can be used to construct antisense sequences to control the expression of the coding sequence of interest.

[0177] The invention also provides the use of the polypeptide, polynucleotide, or inhibitor of the invention to interfere with the initial physical interaction between a pathogen and mammalian host responsible for infection. In particular the molecules of the invention may be used: in the prevention of adhesion and colonization of bacteria to mammalian extracellular matrix proteins; to extracellular matrix proteins in wounds; to block mammalian cell invasion; or to block the normal progression of pathogenesis.

[0178] The antagonists and agonists of the invention may be employed, for instance, to inhibit and treat a variety of bacterial infections.

[0179] Optionally, compounds identified in any of the above-described assays may be confirmed as useful in conferring protection against the development of a pathogenic infection in any standard animal model (e.g., the mouse-burn assay described herein) and, if successful, may be used as anti-pathogen therapeutics (e.g, antibiotics).

### Pharmaceutical Therapeutics

[0180] The invention provides a simple means for identifying compounds (including peptides, small molecule inhibitors, and mimetics) capable of inhibiting the pathogenicity or virulence of a pathogen. Accordingly, a chemical entity discovered to have medicinal or agricultural value using the methods described herein are useful as either drugs, vaccines, or as information for structural modification of existing anti-pathogenic compounds, e.g., by rational drug design. Such methods are useful for screening compounds having an effect on E. coli infection.

[0181] For therapeutic uses, the compositions or agents identified using the methods disclosed herein may be administered systemically, for example, formulated in a pharmaceutically-acceptable buffer such as physiological saline. Treatment may be accomplished directly, e.g., by treating the animal (e.g., a human) with antagonists which disrupt, suppress, attenuate, or neutralize the biological events associated with a pathogenicity polypeptide. Preferable routes of administration include, for example, subcutaneous, intravenous, interperitoneally, intramuscular, or intradermal injections which provide continuous, sustained levels of the drug in the patient. Treatment of human patients or other animals will be carried out using a therapeutically effective amount of an anti-pathogenic agent in a physiologically-acceptable carrier. Suitable carriers and their formulation are described, for example, in Remington's Pharmaceutical Sciences by E. W. Martin. The amount of the anti-pathogenic agent (e.g., an antibiotic) to be administered varies depending upon the manner of administration, the age and body weight of the patient, and with the type of disease and extensiveness of the disease. Generally, amounts will be in the range of those used for other agents used in the treatment of other microbial diseases, although in certain instances lower amounts will be needed because of the increased specificity of the compound. A compound is administered at a dosage that inhibits microbial proliferation. For example, for systemic administration a compound is administered typically in the range of 0.1 ng-10 g/kg body weight.

[0182] Polypeptides according to the invention (such as any one described in Tables 2, 3, or 7) may be purified and isolated by methods known in the art. In particular, having identified a gene sequence, it will be possible to use recombinant techniques to express the gene in a suitable host. Active fragments and related molecules can be identified and may be useful in therapy and are formulated according to methods known in the art. For example, a peptide or its active fragment may be used as an antigenic determinant in a vaccine, to elicit an immune response.

[0183] There are at least two critical properties of pathogenic antigens (e.g., a bacterial antigen) in determining their efficacy as a vaccine: availability and immunogenicity. An antigen must be expressed by the disease-causing agent and made available to the immune system in order for it to be a suitable target for an immune response. Furthermore, when available to the immune system, it must be sufficiently immunogenic to induce immunity. The screens described herein, by their very design, have exclusively identified E. coli O157 antigens that possess these properties. Therefore any of the above listed proteins would be suitable for inducing an immune response to E. coli O157 in mammals.

[0184] Proteins identified in either the IVIAT or PELS screen are suitable as vaccines for use in all mammals, including both humans and cattle. It is well known in the art that calves are suitable models for testing the efficacy of vaccines against bacterial pathogens (Skinner et al., Infect Immun. 2005 July; 73(7): 4441-4444). Methods are well known in the art to confirm whether any of the proteins identified in either of the above described assays is immunogenic in a particular mammal. Briefly, the mammal is injected with the protein and a pharmecutically acceptable carrier. After a sufficient duration, blood is drawn from the mammal and assayed for antibodies to the selected protein.

[0185] Different types of vaccines can be developed according to standard procedures known in the art. For example, a vaccine may be peptide-based, nucleic acid-based, bacterial- or viral-based vaccines. A vaccine formulation containing at least one polypeptide or nucleic acid of the invention may contain a variety of other components, including stabilizers. The vaccine also optionally includes or is co-administered with one or more suitable adjuvants, such as a mucosal adjuvant. The mucosal adjuvant may be any known in the art appropriate for human use (e.g., cholera toxin (CT), enterotoxigenic E. coli heat-labile toxin (LT), or a derivative, subunit, or fragment of CT or LT which retains adjuvanticity). The mucosal adjuvant is co-administered with the polypeptide vaccine in an amount effective to induce or enhance a mucosal immune response, particularly a humoral and/or a mucosal immune response. The ratio of adjuvant to the polypeptide vaccine may be determined by standard methods by one skilled in the art.

[0186] They may also be used in the preparation of antibodies, for passive immunization, or diagnostic applications. Suitable antibodies include monoclonal antibodies, or fragments thereof, including single-chain Fv fragments. Methods for the preparation of antibodies will be apparent to those skilled in the art.

[0187] Active fragments are those that retain a biological function of the peptide or which generate antibodies that are specific for that peptide. For example, when used to elicit an immune response, the fragment will be of sufficient size, such that antibodies generated from the fragment will discriminate between that peptide and other peptides of the bacterial microorganism. Typically, the fragment will be at least 30 nucleotides (10 amino acids) in size, preferably 60 nucleotides (20 amino acids) and most preferably greater than 90 nucleotides (30 amino acids) in size or according to the sizes described herein. Such fragments are formulated according to standard methods known in the art.

### Diagnostics

[0188] The hybridization of any of the nucleic acids molecules identified in Tables 2, 3, or 7 or both are useful in determining the bacterial strain profile according to methods known in the art. Such nucleic acids may be used as targets in a microarray. The microarray is used to assay the bacterial strain typing profile

TABLE 1
Ivi-proteins with a reported role in O157 pathogenesis.

| | Insert | | | | | |
|---|---|---|---|---|---|---|
| | localization | | | | No. of reactive sera³ | |
| IVIAT | on EDL933 | | | Contig/plasmid | HUS sera | Control |
| clone | genome | Gene/Protein/Function¹ | Bacterial cell localization² | accession number | (4) | serum (1) |
| H-310 | OI # 148 | eae/intimin/attaching | Outer membrane | AE005595 | 4 | 0 |
| | | and effacing | | | | |
| H-13, 75 | pO157 | msbB2/MsbB/lipid A | Inner membrane | AF074613 | 4 | 0 |
| | | acyltransferase | | | | |
| H-124 | pO157 | L7031/probable toxR- | Inner membrane | AF074613 | 4 | 0 |
| | | regulated lipoprotein | | | | |
| | | TagA | | | | |
| H-314 | Backbone | qseA/transcriptional | Cytoplasm | AE005552 | 4 | 0 |
| | | regulator, LysR type; | | | | |
| | | quorum sensing | | | | |
| | | regulator A | | | | |

¹Putative function of hypothetical proteins determined from the cluster of orthologous groups (COGs) when available.
²Bacterial cell localization of proteins predicted by the PSORT/PSORT-B program.
³Sera from (4) patients with HUS, and (1) healthy person were tested individually.

TABLE 2
Backbone encoded O157 ivi-proteins.

| Amino | Nucleic | | | | Contig | No. of reactive sera³ | |
|---|---|---|---|---|---|---|---|
| Acid SEQ | Acid SEQ | IVIAT | Gene/Protein/Specific | Bacterial cell | Accession | HUS | Control. |
| ID NO: | ID NO: | clone | function¹ | localization² | NO. | sera (4) | sera (1) |

Macromolecule Synthesis:

| | | | | | | | |
|---|---|---|---|---|---|---|---|
| | | H-5, 20 | topA/DNA topoisomerase | Cytoplasm | AE005379 | 4 | 0 |
| | | | type I, omega protein/DNA | | | | |
| | | | replication, repair, | | | | |
| | | | restriction/modification | | | | |
| | | H-9 | dsbA/protein disulfide | Periplasm | AE005616 | 4 | 0 |
| | | | isomerase I essential for | | | | |
| | | | cytochrome C synthesis and | | | | |
| | | | formate-dependent | | | | |
| | | | reduction/protein | | | | |
| | | | translation and f | | | | |
| | | | modification | | | | |
| | | H-22, 23 | crcB/putative protein | Inner | AE005242 | 4 | 0 |
| | | | involved in chromosome | membrane | | | |
| | | | condensation | | | | |
| | | H-37 | purK/ | Cytoplasm | AE005233 | 4 | 0 |
| | | | phosphoribosylaminoimidazole | | | | |
| | | | carboxylase = AIR | | | | |
| | | | carboxylase, CO₂fixing | | | | |
| | | | subunit/purine | | | | |
| | | | ribonucleotide biosynthesis | | | | |
| | | H-40 | purD/ | Cytoplasm | AE005632 | 4 | 0 |
| | | | phosphoribosylglycinamide | | | | |
| | | | synthetase = GAR synthetase/ | | | | |
| | | | purine ribonucleotide | | | | |
| | | | biosynthesis | | | | |
| 1 | 2 | H-42 | apbA/thiamine | Inner | AE005221 | 4 | 0 |
| | | | biosynthesis, alternate | membrane | | | |
| | | | pyrimidine biosynthesis | | | | |
| | | H-110 | recR/DNA replication, | Cytoplasm | AE005487 | 4 | 0 |
| | | | repair, | | | | |
| | | | restriction/modification | | | | |
| | | H-121 | cysD/ATP: sulfate | Cytoplasm | AE005502 | 4 | 0 |
| | | | adenylytransferase, subunit 2 | | | | |
| | | H-145, 183 | glgP/glycogen | Cytoplasm | AE005566 | 4 | 0 |
| | | | phosphorylase/ | | | | |
| | | | polysaccharide modification | | | | |
| | | H-211 | mutH/methyl-directed | Cytoplasm | AE005512 | 4 | 1 |
| | | | mismatch repair/DNA | | | | |
| | | | replication, repair, | | | | |
| | | | restriction/modification | | | | |
| | | H-230 | Z2851/putative Rad3- | Cytoplasm | AE005403 | 1 | 0 |
| | | | related DNA helicase | | | | |
| 3 | 4 | H-245, 260 | dfp/flavoprotein affecting | Inner | AB005591 | 4 | 0 |
| | | | synthesis of DNA and | membrane | | | |
| | | | pantothenate metabolism/ | | | | |
| | | | DNA replication, repair, | | | | |
| | | | restriction/modification | | | | |
| | | H-313 | mutS/methyl-directed | Cytoplasm | AE005501 | 4 | 0 |
| | | | mismatch repair/DNA | | | | |
| | | | replication, repair, | | | | |
| | | | restriction/modification | | | | |

Small Molecule Synthesis:

| | | | | | | | |
|---|---|---|---|---|---|---|---|
| 5 | 6 | H-11 | ggt/gamma- | Periplasm | AE005568 | 4 | 1 |
| | | | glutamyltranspeptidase/ | | | | |
| | | | biosynthesis of cofactors, | | | | |
| | | | carriers: thioredoxin, | | | | |
| | | | glutaredoxin, glutathione | | | | |
| | | H-60 | Z3637/putative thiamine | Cytoplasm | AE005468 | 4 | 0 |
| | | | pyrophosphate requiring | | | | |
| | | | enzyme - isoleucine, | | | | |
| | | | leucine, valine biosynthesis | | | | |
| | | H-71 | dapD/2,3,4,5- | Cytoplasm | AE005192 | 2 | 1 |
| | | | tetrahydropyridine-2- | | | | |
| | | | carboxylate N-succinyl | | | | |
| | | | transferase/amino acid | | | | |
| | | | biosynthesis: lysine | | | | |
| | | H-116, 137 | glyA/serine | Inner | AE005485 | 4 | 0 |
| | | | hydroxymethyltransferase/ | membrane | | | |
| | | | amino acid biosynthesis: | | | | |
| | | | glycine | | | | |
| | | H-117 | accC/acetyl CoA | Cytoplasm | AE005553 | 4 | 0 |
| | | | carboxylase, biotin | | | | |
| | | | carboxylase subunit/fatty | | | | |
| | | | acid and phosphatidic acid | | | | |
| | | | biosynthesis | | | | |
| | | H-131, 133 | hemK/putative | Cytoplasm | AE005338 | 4 | 0 |
| | | | protoporphyrinogen oxidase/ | | | | |
| | | | biosynthesis of cofactors: | | | | |
| | | | heme, porphyrin | | | | |
| | | H-132 | alaS/alanyl-tRNA | Inner | AE005498 | 4 | 0 |
| | | | synthetase/tRNA | membrane | | | |
| | | | modification | | | | |
| | | H-164 | folE/GTP cyclohydrase/ | Cytoplasm | AE005447 | 4 | 0 |
| | | | biosynthesis of cofactors, | | | | |
| | | | carriers:folic acid | | | | |
| | | H-174 | nadE/NAD synthetase/ | Cytoplasm | AE005397 | 4 | 0 |
| | | | biosynthesis of cofactors, | | | | |
| | | | carriers: pyridine | | | | |
| | | H-177 | hisS/histidine-tRNA | Inner | AE005480 | 4 | 1 |
| | | | synthetase/tRNA | membrane | | | |
| | | | modification | | | | |
| 7 | 8 | H-194 | Z2789/putative thiosulfate | Periplasm | AE005398 | 4 | 0 |
| | | | sulfur transferase | | | | |
| 9 | 10 | H-227 | cstC/acetylornithine delta- | Inner | AE005397 | 4 | 0 |
| | | | aminotransferase/amino | membrane | | | |
| | | | acid biosynthesis: arginine | | | | |
| | | H-267 | lysS/lysine-tRNA | Cytoplasm | AE005519 | 4 | 0 |
| | | | synthetase/tRNA | | | | |
| | | | modification | | | | |
| 11 | 12 | H-279, 280, | proB/gamma-glutamate | Inner | AE005202 | 4 | 0 |
| | | 282, 283, | kinase/amino acid | membrane | | | |
| | | 308, 312 | biosynthesis: praline | | | | |

Macromolecule Degradation:

| | | | | | | | |
|---|---|---|---|---|---|---|---|
| | | H-79 | hycI/protease/process C- | Cytoplasm | AE005500 | 2 | 0 |
| | | | terminal end of the large | | | | |
| | | | subunit of hydrogenase 3 | | | | |
| | | H-99 | Z5946/putative restriction | Cytoplasm | AE005666 | 2 | 0 |
| | | | endonuclease S subunits | | | | |
| | | H-100, 253 | Z3649/putative cellulase M | Cytoplasm | AE005469 | 4 | 0 |
| | | | and related protein | | | | |
| | | H-140, 154, | dcp/dipeptidyl | Cytoplasm | AE005351 | 4 | 0 |
| | | 215, 218, | carboxypeptidase II/ | | | | |
| | | 219, 222 | degradation of proteins, | | | | |
| | | | peptides, glycopeptides | | | | |
| 13 | 14 | H-173 | Z1305/putative ATP- | Inner | AE005285 | 2 | 0 |
| | | | dependent protease | membrane | | | |
| | | H-185 | malS/alpha-amylase/ | Periplasm | AE005584 | 4 | 0 |
| | | | degradation of | | | | |
| | | | polysaccharides | | | | |
| | | H-188 | uvrB/excision nuclease | Cytoplasm | AE005259 | 4 | 0 |
| | | | subunit B/degradation of | | | | |
| | | | DNA | | | | |
| | | H-236 | Z2427/putative metal- | Cytoplasm | AE005372 | 4 | 0 |
| | | | dependent | | | | |
| | | | amidase/aminoacylase/carboxypeptidase | | | | |
| 15 | 16 | H-242 | exo/5′-3′ exonuclease/ | Inner | AE005508 | 4 | 0 |
| | | | degradation of DNA | membrane | | | |
| 17 | 18 | H-304, 307, | endA/endonuclease I/ | Periplasm | AE005525 | 4 | 0 |
| | | 309 | degradation of DNA | | | | |

Small molecule Degradation:

| | | | | | | | |
|---|---|---|---|---|---|---|---|
| | | H-7 | FadA/thiolaase I/ | Cytoplasm | AE005615 | 4 | 0 |
| | | | degradation of fatty acids | | | | |
| | | H-8 | rnt/ribonuclease T/ | Cytoplasm | AE005388 | 4 | 0 |
| | | | degrades tRNA | | | | |
| | | H-46, 67 | xylA/D-xylose isomerase/ | Cytoplasm | AE005583 | 4 | 0 |
| | | | degradation of carbon | | | | |
| | | | compounds | | | | |
| | | H-58 | Z0666/putative | Cytoplasm | AE005232 | 4 | 0 |
| | | | dihydroorotase and related | | | | |
| | | | cyclic amidohydrolases | | | | |
| 19 | 20 | H-74 | hflB/integral membrane | Inner | AE005546 | 4 | 0 |
| | | | peptidase/degrades sigma | membrane | | | |
| | | | 32 | | | | |
| | | H-91, 93 | malY/enzyme that blocks | Cytoplasm | AE005386 | 4 | 0 |
| | | | biosynthesis or degrades | | | | |
| | | | endogenous Mal inducer, | | | | |
| | | | probably aminotransferase/ | | | | |
| | | | degradation of carbon | | | | |
| | | | compounds | | | | |
| 21 | 22 | H-104 | galK/galactokinase/ | Inner | AE005253 | 4 | 0 |
| | | | degradation of carbon | membrane | | | |
| | | | compounds | | | | |
| | | H-166 | celF/phosphor-beta- | Cytoplasm | AE005396 | 4 | 0 |
| | | | glucosidase/degradation of | | | | |
| | | | carbon compounds | | | | |
| 23 | 24 | H-175 | treF/trehalase/ | Inner | AE005577 | 4 | 0 |
| | | | degradation of carbon | membrane | | | |
| | | | compounds | | | | |
| | | H-178, 241 | YciA/putative acyl CoA | Cytoplasm | AE005342 | 2 | 0 |
| | | | hydrolase | | | | |
| 25 | 26 | H-301 | malZ/maltodextrin | Inner | AE005219 | 4 | 0 |
| | | | glucosidase/degradation of | membrane | | | |
| | | | carbon compounds | | | | |

Energy/Metabolism:

| | | | | | | | |
|---|---|---|---|---|---|---|---|
| | | H-3 | yhaF/putative 2,4, | Cytoplasm | AE005541 | 4 | 0 |
| | | | dihydroxyhept-2-ene- | | | | |
| | | | 1,7dioic | | | | |
| | | | acid aldolase | | | | |
| 27 | 28 | H-16 | Z2579/putative DMSO | Inner | AE005382 | 4 | 0 |
| | | | reductase | membrane | | | |
| | | H-19 | Z2779/putative | Cytoplasm | AE005397 | 4 | 0 |
| | | | arginine/ornithine N- | | | | |
| | | | succinyl transferase beta | | | | |
| | | | subunit | | | | |
| | | H-29 | fba/fructose-bisphosphate | Cytoplasm | AE005522 | 4 | 0 |
| | | | aldolase, class II/glycolysis | | | | |
| | | H-35 | Z2723/putative | Cytoplasm | AE005392 | 4 | 0 |
| | | | oxidoreductase | | | | |
| | | H-39 | hycG/hydrogenase/carbon | Cytoplasm | AE005500 | 4 | 0 |
| | | | fermentation | | | | |
| | | H-49, 50, | adhP/alcohol | Cytoplasm | AE005357 | 4 | 0 |
| | | 52, 53, 134 | dehydrogenase/anaerobic | | | | |
| | | | respiration | | | | |
| | | H-54 | ycaH/putative | Cytoplasm | AE005281 | 4 | 1 |
| | | | tetraacyldisaccharide-1-P4′- | | | | |
| | | | kinase | | | | |
| | | H-72 | narW/cryptic nitrate | Cytoplasm | AE005359 | 4 | 0 |
| | | | reductase 2, delta subunit/ | | | | |
| | | | anaerobic respiration | | | | |
| 29 | 30 | H-85 | dmsC/dimethyl sulfoxide | Inner | AE005279 | 4 | 0 |
| | | | reductase, subunit C/ | membrane | | | |
| | | | anaerobic respiration | | | | |
| 31 | 32 | H-88 | ccmH/possible subunit of | Inner | AE005452 | 4 | 1 |
| | | | heme lyase/electron | membrane | | | |
| | | | transport | | | | |
| 33 | 34 | H-103, 165 | ygjL/putative NADPH | Inner | AE005538 | 4 | 0 |
| | | | dehydrogenase | membrane | | | |
| 35 | 36 | H-105 | nrfE/formate dependent | Inner | AE005640 | 4 | 0 |
| | | | nitrite reductase/anaerobic | membrane | | | |
| | | | respiration | | | | |
| 37 | 38 | H-108 | phoA/alkaline phosphatase/ | Periplasm | AE005217 | 4 | 1 |
| | | | central intermediary | | | | |
| | | | metabolism | | | | |
| | | H-111 | yhdJ/putative | Cytoplasm | AE005554 | 4 | 0 |
| | | | methyltransferase | | | | |
| 39 | 40 | H-114, 142 | visC/putative 2-polyprenyl- | Inner | AE005521 | 4 | 0 |
| | | | 6-methoxyphenol | membrane | | | |
| | | | hydorxylase and related | | | | |
| | | | FAD-dependent | | | | |
| | | | oxidoreductases | | | | |
| 41 | 42 | H-118 | citF/citrate lyase alpha | Inner | AE005241 | 4 | 0 |
| | | | chain/central intermediary | membrane | | | |
| | | | metabolism | | | | |
| 43 | 44 | H-122 | yleB/putative 2- | Inner | AE005245 | 4 | 0 |
| | | | polyprenyl-6- | membrane | | | |
| | | | methoxyphenol hydorxylase | | | | |
| | | | and related FAD-dependent | | | | |
| | | | oxidoreductases | | | | |
| 45 | 46 | H-138 | citE/citrate lyase beta | Inner | AE005241 | 4 | 0 |
| | | | chain/central intermediary | membrane | | | |
| | | | metabolism | | | | |
| | | H-147 | ygfZ/putative | Cytoplasm | AE005520 | 4 | 0 |
| | | | aminomethyltransferase | | | | |
| | | | related to GcvT | | | | |
| | | H-149 | nrdB/ribonucleoside | Cytoplasm | AE005456 | 4 | 0 |
| | | | diphosphage reductase, beta | | | | |
| | | | sbunit, B2/central | | | | |
| | | | intermediary metabolism | | | | |
| 47 | 48 | H-153 | agaV/N- | Inner | AE005542 | 4 | 0 |
| | | | acetylgalactosamine- | membrane | | | |
| | | | specific IIB component 2 | | | | |
| | | | (EIIB-AGA)/central | | | | |
| | | | intermediary metabolism | | | | |
| 49 | 50 | H-160, 264 | Z4220/putative | Inner | AE005518 | 4 | 0 |
| | | | dehydrogenase | membrane | | | |
| 51 | 52 | H-167 | nuoL/NADH | Inner | AE005460 | 4 | 1 |
| | | | dehydrogenase I chain L/ | membrane | | | |
| | | | anaerobic respiration | | | | |
| 53 | 54 | H-171, 306 | hybD/probable processing | Inner | AE005529 | 4 | 0 |
| | | | element for hydrogenase-2/ | membrane | | | |
| | | | anaerobic respiration | | | | |
| 55 | 56 | H-186 | nuoM/NADH | Inner | AE005459 | 4 | 1 |
| | | | dehydrogenase I chain M/ | membrane | | | |
| | | | anaerobic respiration | | | | |
| 57 | 58 | H-205 | Z3775/putative | Outer | AE005480 | 4 | 0 |
| | | | dehydrogenase | membrane | | | |
| | | H-216 | Z4018/putative flavodoxin | Cytoplasm | AE005499 | 4 | 0 |
| | | H-217, 221, | Z5951/putative GTPase | Cytoplasm | AE005666 | 4 | 0 |
| | | 223 | (G3E family) | | | | |
| | | H-224 | yhjL/putative | Cytoplasm | AE005579 | 4 | 0 |
| | | | oxidoreductase | | | | |
| | | H-233, 288 | narY/cryptic nitrate | Cytoplasm | AE005359 | 4 | 0 |
| | | | reductase 2, beta subunit/ | | | | |
| | | | anaerobic respiration | | | | |
| 59 | 60 | H-237 | solA/putative sarcosine | Periplasm | AE005316 | 2 | 0 |
| | | | oxidase-like protein | | | | |
| | | H-239 | yidS/putative | Cytoplasm | AE005600 | 4 | 0 |
| | | | dehydrogenase | | | | |
| | | | (flavoprotein) | | | | |
| 61 | 62 | H-244 | ugd/UDP-glucose-6- | Inner | AE005428 | 4 | 0 |
| | | | dehydrogenase/central | membrane | | | |
| | | | intermediary metabolism | | | | |
| 63 | 64 | H-254 | yliI/putative | Periplasm | AE005265 | 4 | 0 |
| | | | dehydrogenase | | | | |
| | | H-258 | Z3401/putative | Inner | AE005446 | 4 | 0 |
| | | | oxidoreductase | membrane | | | |
| | | H-270, 276 | epd/D-erythrose-4- | Cytoplasm | AE005523 | 4 | 0 |
| | | | phosphate dehydrogenase/ | | | | |
| | | | central intermediary | | | | |
| | | | metabolism | | | | |
| | | H-277 | ybjT/putative dTDP- | Inner | AE005268 | 4 | 0 |
| | | | glucose enzyme | membrane | | | |
| | | H-287 | yraL/putative | Cytoplasm | AE005543 | 4 | 0 |
| | | | methyltransferase | | | | |
| | | H-292 | Z3734/putative | Inner | AE005477 | 4 | 0 |
| | | | metalloprotease | membrane | | | |
| | | H-295 | yeaA/putative peptide | Cytoplasm | AE005401 | 4 | 0 |
| | | | methionine sulfoxide | | | | |
| | | | reductase | | | | |
| | | H-300 | wecB/UDP-N-acetyl | Cytoplasm | AE005610 | 4 | 0 |
| | | | glucosamine-2-epimerase/ | | | | |
| | | | central intermediary | | | | |
| | | | metabolism | | | | |
| | | H-305 | tktA/transketolase 1 | Cytoplasm | AE005524 | 4 | 0 |
| | | | isoenzyme/central | | | | |
| | | | intermediary metabolism | | | | |
| | | H-315 | pflD/formate acetyl- | Cytoplasm | AE005626 | 4 | 0 |
| | | | transferase 2/anaerobic | | | | |
| | | | respiration | | | | |

Regulatory:

| | | | | | | | |
|---|---|---|---|---|---|---|---|
| 65 | 66 | H-1 | basS/BasS/sensor protein | Inner | AE005644 | 4 | 0 |
| | | | for BasR involved in | membrane | | | |
| | | | macromolecule synthesis | | | | |
| | | H-14 | phoQ/pho Q/sensor | Inner | AE005328 | 4 | 0 |
| | | | protein; global regulation | membrane | | | |
| | | H-24 | mopB/GroES chaperone/ | Cytoplasm | AE005648 | 2 | 0 |
| | | | folding and ushering | | | | |
| | | | proteins | | | | |
| 67 | 68 | H-27 | pqiA/paraquat-inducible | Inner | AE005285 | 4 | 1 |
| | | | protein A/not characterized | membrane | | | |
| | | H-45, 87, | xylR/XylR/regulates the | Cytoplasm | AE005583 | 4 | 0 |
| | | 290, 293 | xyl operon involved in | | | | |
| | | | xylose utilization | | | | |
| | | H-81, 83 | ydeW/putative | Inner | AE005353 | 4 | 0 |
| | | | transcriptional regulator | membrane | | | |
| | | H-82 | glnG/GlnG/response | Cytoplasm | AE005617 | 4 | 0 |
| | | | regulator for gln operon | | | | |
| | | | involved in glutamine | | | | |
| | | | biosynthesis; interacts with | | | | |
| | | | sensor glnL | | | | |
| 69 | 70 | H-86 | rcsF/RcsF/regulates the | Outer | AE005195 | 4 | 0 |
| | | | rcs regulon involved in | membrane | | | |
| | | | colanic acid synthesis; | | | | |
| | | | interacts with rcsB | | | | |
| | | H-94 | yieP/putative | Cytoplasm | AE005607 | 4 | 1 |
| | | | transcriptional regulator | | | | |
| 71 | 72 | H-120, 148 | glnL/GlnL/histidine | Inner | AE0055617 | 4 | 1 |
| | | | protein kinase sensor for the | membrane | | | |
| | | | GlnG regulator; glutamine | | | | |
| | | | biosynthesis | | | | |
| | | H-127 | yifB/putative 2-component | Periplasm | AE005608 | 4 | 1 |
| | | | regulator | | | | |
| | | H-141 | uidR/UidR/regulates the | Cytoplasm | AE005385 | 4 | 0 |
| | | | uid operon involved in beta- | | | | |
| | | | glucuronidase synthesis | | | | |
| | | H-159 | prpR/PrpR/regulates the | Cytoplasm | AE005212 | 4 | 1 |
| | | | prp operon involved in | | | | |
| | | | propionate catabolism | | | | |
| | | H-192 | yfeR/putative | Cytoplasm | AE005471 | 4 | 0 |
| | | | transcriptional regulator, | | | | |
| | | | LysR type | | | | |
| | | H-193 | uvrY/putative 2-component | Cytoplasm | AE005414 | 4 | 0 |
| | | | regulator | | | | |
| | | H-195 | ybcZ/putative 2-component | Inner | AE005236 | 4 | 0 |
| | | | sensor | membrane | | | |
| | | H-201 | yeiL/putative | Inner | AE005448 | 4 | 0 |
| | | | transcriptional regulator | membrane | | | |
| | | H-256 | yifA/putative | Cytoplasm | AE005607 | 4 | 0 |
| | | | transcriptional regulator | | | | |
| | | H-262 | fucR/FucR/positive | Cytoplasm | AE005508 | 4 | 0 |
| | | | regulator of the fuc operon | | | | |
| | | H-274 | fliS/Fli S/regulates | Cytoplasm | AE005415 | 4 | 0 |
| | | | flagellar biosynthesis | | | | |
| 73 | 74 | H-278 | hydH/Hyd H/sensor | Inner | AE005632 | 4 | 0 |
| | | | kinase for HydG, | membrane | | | |
| | | | hydrogenase 3 activity | | | | |
| 75 | 76 | H-297 | narX/NarX/nitrate/nitrate | Inner | AE005339 | 2 | 0 |
| | | | sensor, histidine protein | membrane | | | |
| | | | kinase acts on NarL | | | | |
| | | | regulator | | | | |
| | | H-303 | yhjC/putative | Inner | AE005577 | 4 | 0 |
| | | | transcriptional regulator, | membrane | | | |
| | | | LysR type | | | | |
| | | H-311 | Z2724/putative ARAC- | Cytoplasm | AE005392 | 4 | 0 |
| | | | type regulator | | | | |

Transport:

| | | | | | | | |
|---|---|---|---|---|---|---|---|
| 77 | 78 | H-4, 289 | ascF/AscF; PTS system | Inner | AE005500 | 4 | 0 |
| | | | enzyme II/transport of | membrane | | | |
| | | | small molecules: arbutin, | | | | |
| | | | salicin, cellobiose | | | | |
| | | H-10 | ybhS/putative ABC-type | Inner | AE005260 | 4 | 1 |
| | | | multidrug transport system, | membrane | | | |
| | | | permease component | | | | |
| 79 | 80 | H-12 | wzxC/putative export | Inner | AE005430 | 4 | 0 |
| | | | protein; protein, peptide | membrane | | | |
| | | | secretion | | | | |
| | | H-15 | FlhB/flhB/export of | Inner | AE005410 | 4 | 0 |
| | | | flagellar proteins | membrane | | | |
| | | H-28 | yohM/putative ABC-type | Inner | AE005437 | 4 | 0 |
| | | | uncharacterized transport | membrane | | | |
| | | | system, permease | | | | |
| | | | component | | | | |
| 81 | 82 | H-31 | tdcC/TdcC; anaerobically | Inner | AE005540 | 4 | 0 |
| | | | induced permease/transport | membrane | | | |
| | | | of amino acids: L-threonine, | | | | |
| | | | L-serine | | | | |
| 83 | 84 | H-34 | malF/MalF; permease/ | Inner | AE005636 | 4 | 0 |
| | | | transport of small | membrane | | | |
| | | | molecules: maltose | | | | |
| | | H-44, 200, | yegT/putative nucleoside | Inner | AE005436 | 4 | 0 |
| | | 213, 250, | permease | membrane | | | |
| | | 251, 286 | | | | | |
| 85 | 86 | H-47, 66, | ycbQ/putative chaperone | Outer | AE005284 | 4 | 0 |
| | | 266 | | membrane | | | |
| | | H-59 | yedE/putative transport | Inner | AE005415 | 4 | 0 |
| | | | system permease protein | membrane | | | |
| | | H-73 | Z4150/putative transport | Inner | AE005512 | 4 | 0 |
| | | | protein | membrane | | | |
| | | H-76 | yhfC/putative transport | Inner | AE005559 | 4 | 0 |
| | | | protein | membrane | | | |
| 87 | 88 | H-92 | yaeM/putative ATP- | Inner | AE005193 | 4 | 0 |
| | | | binding component of | membrane | | | |
| | | | transport system | | | | |
| | | H-101 | Z2654/putative chaperone | Cytoplasm | AE005387 | 4 | 0 |
| | | | distantly related to HSP70- | | | | |
| | | | fold metalloprotease | | | | |
| | | H-109, 168, | livG/LivG; ATP-binding | Cytoplasm | AE005569 | 4 | 0 |
| | | 169, 172, | component of high affinity | | | | |
| | | 182, 184 | branched-chain amino acid | | | | |
| | | | transport system/transport | | | | |
| | | | of amino acids, amines | | | | |
| | | H-115 | ugpC/UgpC; ATP-binding | Cytoplasm | AE005568 | 4 | 0 |
| | | | component of glycerol-3- | | | | |
| | | | phopshate transport system/ | | | | |
| | | | transport of small | | | | |
| | | | molecules: carbohydrates, | | | | |
| | | | organic acids, alcohols | | | | |
| 89 | 90 | H-125, 275 | ycdG/putative | Inner | AE005300 | 4 | 0 |
| | | | xanthine/uracil permease | membrane | | | |
| 91 | 92 | H-126 | kefC/KefC/transport of | Inner | AE005181 | 4 | 0 |
| | | | cations: K+ efflux | membrane | | | |
| | | | antiporter, glutathione | | | | |
| | | | regulated | | | | |
| 93 | 94 | H-143 | Z3262/putative ADP- | Inner | AE005436 | 4 | 0 |
| | | | ribosylglycohydrolase | membrane | | | |
| 95 | 96 | H-163 | yhfM/putative amino | Inner | AE005560 | 2 | 0 |
| | | | acid/amine transport protein | membrane | | | |
| | | H-176 | Z5178/putative PTS | Inner | AE005600 | 4 | 0 |
| | | | component; transport of | Membrane | | | |
| | | | carbohydrates, organic | | | | |
| | | | acids, alcohols | | | | |
| 97 | 98 | H-187 | wzb/putative tyrosine | Inner | AE005432 | 4 | 0 |
| | | | phosphatase | membrane | | | |
| 99 | 100 | H-197 | kgtP/KgtP; alpha- | Inner | AE005489 | 4 | 0 |
| | | | ketoglutarate permease/ | membrane | | | |
| | | | transport of small | | | | |
| | | | molecules: carbohydrates, | | | | |
| | | | organic acids, alcohols | | | | |
| | | H-202, 261 | fhuA/FhuA/transport of | Outer | AE005191 | 4 | 0 |
| | | | ferrichrome (Fe3+) and | membrane | | | |
| | | | antibiotics, acts as a | | | | |
| | | | receptor for phages and | | | | |
| | | | colicins | | | | |
| 101 | 102 | H-206 | nagE/NagE; PTS system | Inner | AE005246 | 4 | 0 |
| | | | N-acetylglucosamine | membrane | | | |
| | | | specific enzyme IIABC/ | | | | |
| | | | transport of amino acids, | | | | |
| | | | amines | | | | |
| | | H-225 | sgaB/putative PTS, | Cytoplasm | AE005652 | 4 | 0 |
| | | | galactitol-specific IIB | | | | |
| | | | component | | | | |
| | | H-226 | Z2786/putative ABC-type | Periplasm | AE005398 | 4 | 0 |
| | | | uncharacterized transport | | | | |
| | | | system, periplasmic | | | | |
| | | | component | | | | |
| | | H-228 | yaaU/putative transport | Inner | AE005181 | 4 | 0 |
| | | | protein | membrane | | | |
| | | H-240 | cycA/CycA; permease/ | Inner | AE005653 | 4 | 0 |
| | | | transport of amino acids and | membrane | | | |
| | | | amines: D-alanine, D-serine, | | | | |
| | | | glycine | | | | |
| 103 | 104 | H-252 | oppB/OppB; oligopeptide | Inner | AE005342 | 4 | 0 |
| | | | transport permease protein/ | membrane | | | |
| | | | transport of large molecules: | | | | |
| | | | proteins, peptides | | | | |
| | | H-271 | Z5839/putative ATP- | Inner | AE005655 | 4 | 0 |
| | | | binding component of ABC- | membrane | | | |
| | | | type transport system | | | | |
| | | H-273 | Z3589/putative | Cytoplasm | AE005464 | 4 | 0 |
| | | | transporting ATPase | | | | |
| 105 | 106 | H-296 | araG/AraG; ATP-binding | Inner | AE005411 | 2 | 1 |
| | | | component of high affinity | membrane | | | |
| | | | L-arabinose transport | | | | |
| | | | system/transport of small | | | | |
| | | | molecules: L-arabinose | | | | |
| | | H-316 | Z2605/putative | Inner | AE005384 | 4 | 0 |
| | | | arginine/ornithine antiporter | membrane | | | |

Environmental adaptation (chemotaxis, motility, attachment, cell division):

| | | | | | | | |
|---|---|---|---|---|---|---|---|
| 107 | 108 | H-30 | trg/Trg; methyl-accepting | Inner | AE005363 | 4 | 0 |
| | | | chemotaxis protein III, | membrane | | | |
| | | | ribose sensor receptor/ | | | | |
| | | | regulator; chemotaxis and | | | | |
| | | | motility | | | | |
| 109 | 110 | H-36 | osmY/OsmY; | Periplasm | AE005668 | 4 | 0 |
| | | | hyperosmotically inducible | | | | |
| | | | protein/osmotic adaptation | | | | |
| | | H-41, 130, | yjbB/putative alpha helix | Inner | AE005634 | 4 | 0 |
| | | 152, 265 | protein | membrane | | | |
| | | H-55 | fisI/peptidoglycan | Inner | AE005185 | 4 | 0 |
| | | | synthetase/septum | membrane | | | |
| | | | formation | | | | |
| 111 | 112 | H-62, 63, | mepA/murein DD- | Periplasm | AE005464 | 4 | 0 |
| | | 64, 65 | endopeptidase/cell | | | | |
| | | | envelope synthesis | | | | |
| | | H-77 | sfmH/SfmH/fimbrial | Inner | AE005234 | 4 | 0 |
| | | | assembly | membrane | | | |
| | | H-95 | yaeH/putative structural | Cytoplasm | AE005192 | 4 | 0 |
| | | | protein | | | | |
| 113 | 114 | H-96 | cirA/CirA/receptor for | Outer | AE005447 | 4 | 0 |
| | | | iron-regulated colicin I | membrane | | | |
| | | H-150 | yhjD/putative membrane | Inner | AE005577 | 4 | 1 |
| | | | protein | membrane | | | |
| | | H-203 | Z3481/putative membrane | Inner | AE005454 | 4 | 0 |
| | | | protein | membrane | | | |
| 115 | 116 | H-234 | mltB/membrane-bound | Outer | AE005498 | 3 | 0 |
| | | | lytic murein | membrane | | | |
| | | | transglycosylase B/murein | | | | |
| | | | sacculus synthesis | | | | |
| | | H-246 | slt/soluble lytic murein | Inner | AE005670 | 4 | 0 |
| | | | transglycosylase/murein | membrane | | | |
| | | | sacculus synthesis | | | | |
| 117 | 118 | H-268 | tsr/methyl accepting | Inner | AE005667 | 4 | 0 |
| | | | chemotaxis protein I, serine | membrane | | | |
| | | | sensor receptor/regulator, | | | | |
| | | | chemotaxis and motility | | | | |
| | | H-281 | mdaA/MdaA/modulator | Cytoplasm | AE005266 | 4 | 0 |
| | | | of drug activity A | | | | |
| | | H-284 | yibP/putative membrane | Inner | AE005588 | 4 | 0 |
| | | | protein | membrane | | | |
| | | H-302 | phoE/PhoE/outer | Outer | AE005202 | 4 | 0 |
| | | | membrane porin protein E | membrane | | | |

Phage related:

| | | | | | | | |
|---|---|---|---|---|---|---|---|
| 119 | 120 | H-209 | Z1782/unknown encoded | Inner | AE005323 | 4 | 0 |
| | | | within CP-933N | membrane | | | |
| | | H-238 | hflx/GTP-binding subunit | Cytoplasm | AE005650 | 2 | 0 |
| | | | of protease specific for | | | | |
| | | | lambda CII repressor/ | | | | |
| | | | degradation of proteins, | | | | |
| | | | peptides, glycopeptides | | | | |

Unknown:

| | | | | | | | |
|---|---|---|---|---|---|---|---|
| | | H-43, 208, | yfiH/uncharacterized | Cytoplasm | AE005490 | 4 | 0 |
| | | 291 | conserved protein | | | | |
| 121 | 122 | H-57 | ydbD/unknown | Periplasm | AE005365 | 4 | 0 |
| | | H-68, 69 | ychA/uncharacterized | Cytoplasm | AE005338 | 4 | 0 |
| | | | conserved protein | | | | |
| 123 | 124 | H-80 | yfbB/putative enzyme | Inner | AE005458 | 2 | 0 |
| | | | | membrane | | | |
| | | H-97 | ybfE/unknown | Cytoplasm | AE005246 | 4 | 1 |
| | | H-157 | yacC/unknown | Cytoplasm | AE005188 | 4 | 0 |
| 125 | 126 | H-170 | Z4888/unknown | Inner | AE005573 | 4 | 0 |
| | | | | membrane | | | |
| 127 | 128 | H-179 | yciI/unknown | Inner | AE005342 | 4 | 0 |
| | | | | membrane | | | |
| | | H-190 | yjjX/unknown | Cytoplasm | AE005670 | 2 | 0 |
| 129 | 130 | H-198 | yaaH/unknown | Inner | AE005177 | 4 | 0 |
| | | | | membrane | | | |
| 131 | 132 | H-212 | ybiM/unknown | Inner | AE005261 | 4 | 1 |
| | | | | membrane | | | |
| 133 | 134 | H-243 | Z2619/unknown | Outer | AE005385 | 4 | 0 |
| | | | | membrane | | | |

¹Based on homology to the sequenced, E. coli O157 strain EDL933 genome. Putative function of hypothetical proteins determined from the cluster of orthologous groups (COGs) when available.
²Bacterial cell localization of proteins predicted by the PSORT/PSORT-B program.
³Sera from (4) patients with HUS, and (1) healthy person were tested individually.

TABLE 3
O-island and pO157 encoded O157 ivi-proteins.

| | | | Insert | | | Contig/ | No. of reactive | |
|---|---|---|---|---|---|---|---|---|
| | Amino | Nucleic | locaction on | | | plasmid | sera³ | |
| IVIAT | Acid SEQ | Acid SED | EDL 933 | Gene/Protein/ | Bacterial cell | accession | HUS | Control |
| clone | ID NO: | ID NO: | genome | Function¹ | localization | No. | sera (4) | sera (1) |

Assigned function:

| | | | | | | |
|---|---|---|---|---|---|---|
| H-285 | OI # 84 | wbdP/glycosyl | Cytoplasm | AE005429 | 4 | 0 |
| | | transferase/cell surface | | | | |
| | | polysaccharides and | | | | |
| | | antigen synthesis | | | | |

Putative function:

| | | | | | | | | |
|---|---|---|---|---|---|---|---|---|
| H-6 | | | OI # 47 | Z1554/putative ABC- | Inner | AE005305 | 4 | 0 |
| | | | | transport, lipoprotein | membrane | | | |
| | | | | release, permease | | | | |
| | | | | component/cell wall | | | | |
| | | | | biogenesis | | | | |
| H-17 | | | OI # 28 | Z0634/putative | Inner | AE005229 | 4 | 0 |
| | | | | cytoplasmic membrane, | membrane | | | |
| | | | | ABC-type bacteriocin/ | | | | |
| | | | | lantibiotic exporter/ | | | | |
| | | | | defense mechanism | | | | |
| H-25 | | | OI # 108⁴ | Z3936/putative | Cytoplasm | AE005493 | 4 | 0 |
| | | | | transposase, IS30 family | | | | |
| H-33 | | | OI # 43 | Z1214/predicted | Cytoplasm | AE005276 | 4 | 0 |
| | | | | esterase of the alpha-beta | | | | |
| | | | | hydrolase superfamily | | | | |
| H-48, 51, | | | OI # 172 | Z5901/putative helicase | Cytoplasm | AE005661 | 4 | 0 |
| 89, 90 | | | | with a unique C-terminal | | | | |
| | | | | domain including metal- | | | | |
| | | | | binding cysteine cluster | | | | |
| H-78 | 135 | 136 | OI # 9 | Z0348/putative | Inner | AE005205 | 2 | 0 |
| | | | | arabinose efflux | membrane | | | |
| | | | | permease/carbohydrate | | | | |
| | | | | transport | | | | |
| H-84 | | | OI# 17 | Z0419/putative ABC- | Inner | AE005211 | 4 | 0 |
| | | | | type transport permease | membrane | | | |
| H-98 | | | OI # 145 | waaD/putative | Periplasm | AE005590 | 4 | 0 |
| | | | | lipopolysaccharide | | | | |
| | | | | biosynthesis enzyme | | | | |
| | | | | (glycosyltransferase) | | | | |
| H-102 | | | OI # 138 | Z4856/putative acyl- | Inner | AE005571 | 4 | 0 |
| | | | | coenzyme A synthetase/ | membrane | | | |
| | | | | AMP-(fatty) acid ligase | | | | |
| H-113 | 137 | 138 | pO157 | L7004/putative | Cytoplasm- | AF074613 | 4 | 1 |
| | | | | hemolysin expression | Inner | | | |
| | | | | modulating protein - | membrane | | | |
| | | | | hypothetical protein | | | | |
| H-129 | | | OI # 157 | Z5415/predicted | Inner | AE005619 | 2 | 0 |
| | | | | permease | membrane | | | |
| H-135 | 139 | 140 | OI # 30 | Z0705/putative RhsA/ | Inner | AE005236 | 4 | 0 |
| | | | | Rhs family protein | membrane | | | |
| H-136 | | | pO157 | L7091/putative nickase | Cytoplasm | AF074613 | 4 | 0 |
| H-151 | | | OI # 40 | Z1089/putative | Cytoplasm | AE005267 | 4 | 1 |
| | | | | arylsufatase A | | | | |
| H-231 | | | OI # 172 | Z5888/predicted | Cytoplasm | AE005659 | 4 | 0 |
| | | | | transcriptional regulator | | | | |
| H-263 | | | OI # 139 | Z4882/uncharacterized | Cytoplasm | AE005572 | 4 | 0 |
| | | | | protein encoded in | | | | |
| | | | | hypervariable junctions | | | | |
| | | | | of pilus gene clusters | | | | |
| H-298 | 141 | 142 | pO157 | sopA/putative plasmid | Inner | AF074613 | 4 | 0 |
| | | | | partitioning protein A | membrane | | | |

Phage-related:

| | | | | | | | | |
|---|---|---|---|---|---|---|---|---|
| H-18 | | | OI # 52 | Z1930/putative | Inner | AE005334 | 4 | 1 |
| | | | | hydrolase or | membrane | | | |
| | | | | acyltransferase | | | | |
| | | | | (alpha/beta hydrolase | | | | |
| | | | | family), encoded within | | | | |
| | | | | CP-933X | | | | |
| H-38, 56 | | | OI # 52 | Z1883/putative DNA | Cytoplasm | AE005330 | 4 | 0 |
| | | | | packaging protein | | | | |
| | | | | encoded within CP-933X | | | | |
| H-70 | | | OI # 36 | Z0964/putative DNA | Cytoplasm | AE005256 | 4 | 1 |
| | | | | packaging protein | | | | |
| | | | | encoded within CP-933K | | | | |
| H-106 | | | OI # 45⁴ | Z1433/unknown | Cytoplasm | AE005295 | 4 | 0 |
| | | | | encoded within BP- | | | | |
| | | | | 933W | | | | |
| H-112 | | | OI # 52 | Z1882/putative phage | Cytoplasm | AE005330 | 4 | 0 |
| | | | | DNA packaging protein, | | | | |
| | | | | NU1 subunit of | | | | |
| | | | | terminase, encoded in | | | | |
| | | | | CP-933X | | | | |
| H-128 | | | OI # 52 | Z1888/putative capsid | Cytoplasm | AE005330 | 4 | 0 |
| | | | | protein of prophage CP- | | | | |
| | | | | 933X | | | | |
| H-139 | | | OI # 57 | Z2085/putative | Cytoplasm | AE005346 | 4 | 0 |
| | | | | exonuclease VIII | | | | |
| | | | | encoded within CP-933O | | | | |
| H-158 | | | OI # 93 | Z3327/unknown | Cytoplasm | AE005441 | 4 | 0 |
| | | | | encoded within CP-933V | | | | |
| H-191 | | | OI # 71⁴ | Z6060/putative Q anti- | Cytoplasm | AE006460 | 3 | 0 |
| | | | | terminator encoded | | | | |
| | | | | within CP-933P | | | | |
| H-196 | | | OI # 93⁴ | Z3334/unknown | Cytoplasm | AE005442 | 4 | 1 |
| | | | | encoded within CP-933V | | | | |
| H-247 | 143 | 144 | OI # 57⁴ | Z2100/unknown | Inner | AE005347 | 4 | 0 |
| | | | | encoded within CP-933O | membrane | | | |
| H-255, | 145 | 146 | OI # 36 | Z0975/putative tail | Inner | AE005257 | 4 | 0 |
| 257 | | | | component of CP-933K | membrane | | | |
| H-272 | 147 | 148 | OI # 79⁴ | Z3097/putative | Inner | AE005420 | 4 | 0 |
| | | | | peptidase - putative | membrane- | | | |
| | | | | head-tail connector | cytoplasm | | | |
| | | | | protein encoded within | | | | |
| | | | | CP-933U | | | | |

Unknown:

| | | | | | | | | |
|---|---|---|---|---|---|---|---|---|
| H-2 | 149 | 150 | OI # 172 | Z5897/unknown | Inner | AE005660 | 4 | 0 |
| | | | | | membrane | | | |
| H-21 | 151 | 152 | OI # 7 | Z0251/unknown | Cytoplasm | AE005198 | 4 | 0 |
| | | | | (uncharacterized protein | | | | |
| | | | | conserved in bacteria) | | | | |
| H-107 | 153 | 154 | OI # 142 | Z5002/unknown | Cytoplasm | AE005584 | 4 | 0 |
| | | | | (uncharacterized protein | | | | |
| | | | | conserved in bacteria) | | | | |
| H-119 | 155 | 156 | OI # 89 | Z3271/unknown | Inner | AE005436 | 4 | 0 |
| | | | | | membrane | | | |
| H-123 | 157 | 158 | OI # 89 | Z3269/unknown | Cytoplasm | AE005436 | 4 | 0 |
| H-146 | 159 | 160 | OI # 140 | Z4912/unknown | Cytoplasm | AE005576 | 3 | 0 |
| H-162 | 161 | 162 | OI # 102 | Z3616/unknown | Cytoplasm | AE005466 | 4 | 0 |
| H-269 | 163 | 164 | OI # 48⁴ | Z1606/unknown | Inner | AE005309 | 4 | 0 |
| | | | | | membrane | | | |

¹Putative function of hypothetical proteins determined from the cluster of orthologous groups (COGs) when available.
²Bacterial cell localization of proteins predicted by the PSORT/PSORT-B program.
³Sera from (4) patients with HUS, and (1) healthy person were tested individually.
⁴Homologous proteins also found on other O-islands.

TABLE 4
Ivi-proteins expressed from O-islands encoding putative virulence factors.

| O-island no. | Putative virulence factor | Ivi-protein/Function |
|---|---|---|
| OI#7 | Macrophage toxin and a chaperone | Z0251/Unknown |
| OI#28 | A RTX-toxin-like exoprotein and transport system | Z0634/Putative cytoplasmic membrane ABC-type |
| | | bacteriocin/lantibiotic exporter |
| OI#43 | Urease gene cluster | Z1214/A predicted estrase |
| OI#47 | Adhesin and polyketide or fatty acid biosynthesis system | Z1554/Putative ABC-type transporter |
| OI#48 | Urease gene cluster | Z1606/Unknown |
| OI#115 | TTSS and secreted proteins similar to Samonella-Shigella inv- | None identified |
| | spa host-cell invasion proteins | |
| OI#122 | Two toxins and a PagC-like virulence factor | None identified |
| OI#138 | Fatty acid biosynthesis system | Z4856/Putative acyl-coenzyme A synthetase/ |
| | | Fatty acid ligase |
| OI#148 | LEE proteins | Eae/γ-intimin/attaching and effacing |

TABLE 5
O157 backbone ivi-proteins expressed in vitro as identified by proteomic analysis.

| | | 6M Urea and 1% SDS | | Percent |
|---|---|---|---|---|
| | | denaturing solution¹ | | protein |
| No. | O157 ivi-protein | Run 1 | Run 2 | abundance |
| 1 | Z4279 transketolase 1 isozyme (tktA) | + | + | 0.49 |
| 2 | Z5747 GroES, 10 Kd chaperone binds to Hsp60 (mopB) | + | + | 0.32 |
| 3 | Z4263 fructose-bisphosphate aldolase, class II (fba) | + | + | 0.28 |
| 4 | Z4540 degrades sigma32, integral membrane peptidase, cell division (hflB) | + | − | 0.17 |
| 5 | Z4616 acetyl CoA carboxylase, biotin carboxylase subunit (accC) | + | − | 0.14 |
| 6 | Z4228 lysine tRNA synthetase, constitutive suppressor of ColE1 (lysS) | + | + | 0.13 |
| 7 | Z0176 2,3,4,5-tetrahydropyridine-2-carboxylate N-succinyltransferase (dapD) | + | + | 0.11 |
| 8 | Z3999 alanyl-tRNA synthetase (alaS) | + | + | 0.11 |
| 9 | Z2789 putative thiosulfate sulfur transferase | + | − | 0.10 |
| 10 | Z3827 serine hydroxymethyltransferase (glyA) | + | + | 0.09 |
| 11 | Z5977 hyperosmotically inducible periplasmic protein (osmY) | + | + | 0.08 |
| 12 | Z3777 histidine tRNA synthetase (hisS) | + | + | 0.07 |
| 13 | Z5955 methyl-accepting chemotaxis protein I, serine sensor receptor (tsr) | + | + | 0.06 |
| 14 | Z3491 ribonucleoside diphosphage reductase 1, beta subunit, B2 (nrdB) | + | + | 0.06 |
| 15 | Z4043 methyl-directed mismatch repair (mutS) | − | + | 0.05 |
| 16 | Z4478 orf, hypothetical protein (yhaF) | + | − | 0.05 |
| 17 | Z0998 DNA repair excision nuclease subunit B (uvrB) | − | + | 0.05 |
| 18 | Z5392 protein disulfide isomerase I, essential for cytochrome (dsbA) | + | + | 0.04 |

¹Two four hour runs were done using this denaturing condition. Each yielded more than 300 proteins.

TABLE 6
Previously reported adhesins of O157 and other pathogens identified by PELS.

| | Locus ID in O157 | | No. | Percent (%) | |
|---|---|---|---|---|---|
| | EDL 933/Sakai | Mass | peptide | protein | Contributes to |
| Protein | strains | (Kda) | hits | coverage | adherence in: |
| OmpA; outer membrane protein | Z1307/Ecs1041 | 38 | 42 | 43% | O157 |
| 3a (II*; G; d); adhesin | | | | | |
| Iha; adhesin; exogenous ferric | Z1178/Ecs1360 | 77 | 4 | 8% | O157, |
| siderophore receptor R4 | | | | | Uropathogenic E. coli |

TABLE 7
In vivo expressed O157 proteins identified by PELS in cattle.

| | | Region in the | | | | | | |
|---|---|---|---|---|---|---|---|---|
| | | EDL 933 | | | | | | |
| | | genome/ | | | | | Identical or Related proteins | |
| | Nucleic | pO157 | | | | | expressed in vivo in: | |
| Amino | Acid | assocaiated | | | | | Calves as | Humans as |
| Acid SEQ | SEQ | with the | Protein/ | | No. | Percent | identified by | identified by |
| ID NO: | ID NO: | protein¹ | Function² | Cell localization | hits | coverage | STM⁴ | IVIAT⁴ |
| | | Backbone | EcnB/entericidin B; | Extracellular | 1 | 40% | — | — |
| | | | bacteriolytic lipoprotein; | | | | | |
| | | | putative toxin of | | | | | |
| | | | osmotically regulated | | | | | |
| | | | toxin-antitoxin system | | | | | |
| | | | associated with | | | | | |
| | | | programmed cell death | | | | | |
| | | Backbone | OmpA/outer membrane | Outer | 42 | 43% | — | — |
| | | | protein 3a (II*; G; d); | membrane | | | | |
| | | | adhesin | | | | | |
| | | Backbone | Lpp (Murein-lipoprotein)/ | Outer | 7 | 62% | — | MepA, MltB, |
| | | | major outer membrane, | membrane | | | | Slt/murein |
| | | | murein sacculus, | | | | | sacculus |
| | | | peptidoglycan | | | | | synthesis |
| | | | lipoprotein precursor | | | | | |
| | | | (OmpT-like) | | | | | |
| | | Backbone | OmpC/outer membrane | Outer | 4 | 10% | — | — |
| | | | protein 1b (Ib; c); outer | membrane | | | | |
| | | | membrane constituents | | | | | |
| | | O-island # 43 | Z1178 (Iha)/adhesin; | Outer | 4 | 8% | Z1182/ | — |
| | | | exogenous ferric | membrane | | | 1726 bp 5′ | |
| | | | siderophore receptor R4 | | | | of Z1178 | |
| | | | | | | | (Iha) | |
| | | | | | | | adhesin | |
| 165 | 166 | O-island # 140 | ChuA/ | Outer | 1 | 2% | — | HemK/ |
| | | | heme/hemoglobin | membrane | | | | heme |
| | | | receptor (Heme | | | | | biosynthesis, |
| | | | utilization/transport | | | | | CcmH/heme |
| | | | protein) | | | | | lyase |
| 167 | 168 | O-island # 36 | Z0975/putative tail | Outer | 3 | 2% | Z0990/type | Z0975 |
| | | | component of prophage | membrane | | | III secreted | |
| | | | CP-933K | | | | protein | |
| | | | | | | | encoded | |
| | | | | | | | within | |
| | | | | | | | prophage | |
| | | | | | | | CP-933K | |
| 169 | 170 | O-island # 52 | Z1931/outer membrane | Outer | 7 | 15% | Z1930/ | — |
| | | | protein 3b (a), protease | membrane | | | putative | |
| | | | VII/enzyme; outer | | | | protease | |
| | | | membrane | | | | encoded | |
| | | | constituents encoded | | | | within | |
| | | | within prophage CP- | | | | prophage | |
| | | | 933X | | | | CP-933X | |
| | | Backbone | TolC/Outer membrane | Outer | 3 | 5% | — | — |
| | | | channel; specific | membrane | | | | |
| | | | tolerance to colicin E1; | | | | | |
| | | | segregation of daughter | | | | | |
| | | | chromosomes; cell | | | | | |
| | | | division | | | | | |
| | | Backbone | FhuE/outer membrane | Outer | 2 | 5% | — | FhuA/outer |
| | | | receptor for ferric iron | membrane | | | | membrane |
| | | | uptake | | | | | protein |
| | | | | | | | | receptor for |
| | | | | | | | | ferrichrome, |
| | | | | | | | | colicin M, |
| | | | | | | | | and phages |
| | | | | | | | | T1, T5, and |
| | | | | | | | | phi80 |
| | | pO157 | EspP/serine protease; | Outer | 1 | 1% | — | — |
| | | | putative exoprotein- | membrane | | | | |
| | | | precursor | | | | | |
| | | Backbone | OmpF/outer membrane | Outer | 2 | 6% | — | — |
| | | | protein 1a (Ia; b; F); outer | membrane | | | | |
| | | | membrane constituents | | | | | |
| | | Backbone | LamB/phage lambda | Outer | 1 | 4% | — | — |
| | | | receptor protein; maltose | membrane | | | | |
| | | | high-affinity receptor; IS, | | | | | |
| | | | phage, Tn; transport of | | | | | |
| | | | small molecules: | | | | | |
| | | | carbohydrates, organic | | | | | |
| | | | acids, alcohols | | | | | |
| 171 | 172 | Backbone | HflK/protease specific | Outer | 2 | 6% | — | HflX/GTP- |
| | | | for phage lambda cII | membrane | | | | binding |
| | | | repressor; enzyme; | | | | | subunit of |
| | | | macromolecule | | | | | protease |
| | | | degradation: degradation | | | | | specific for |
| | | | of proteins, peptides | | | | | phage |
| | | | | | | | | lambda cII |
| | | | | | | | | repressor |
| | | O-island # 148 | EspB/LEE encoded | Outer | 4 | 23% | EspD/LEE | — |
| | | | type III secreted protein; | membrane | | | encoded | |
| | | | formation of pore along | | | | type III | |
| | | | with EspD on host cell | | | | secreted | |
| | | | membrane | | | | protein; | |
| | | | | | | | formation of | |
| | | | | | | | pore along | |
| | | | | | | | with EspB | |
| | | | | | | | on host cell | |
| | | | | | | | membrane | |
| 173 | 174 | Backbone | HlpA/histone-like | Outer | 1 | 6% | — | — |
| | | | protein, located in outer | membrane | | | | |
| | | | membrane or nucleoid; | | | | | |
| | | | factor, Nucleoid-related | | | | | |
| | | | functions | | | | | |
| | | Backbone | OmpX/outer membrane | Outer | 1 | 7% | — | — |
| | | | protein X; membrane; | membrane | | | | |
| | | | Cell envelop: Outer | | | | | |
| | | | membrane constituents | | | | | |
| 175 | 176 | Backbone | YeaF/hypothetical | Outer | 1 | 5% | — | YeaA/ |
| | | | protein; unknown | membrane | | | | hypothetical |
| | | | function | | | | | protein; |
| | | | | | | | | unknown |
| | | | | | | | | function |
| 177 | 178 | Backbone | CirA/outer membrane | Outer | 1 | 2% | — | CirA |
| | | | receptor for iron- | membrane | | | | |
| | | | regulated colicin I | | | | | |
| | | | receptor; porin; requires | | | | | |
| | | | tonB gene product; Cell | | | | | |
| | | | envelop: Outer | | | | | |
| | | | membrane constituents | | | | | |
| 179 | 180 | O-island # 36 | Z0955/hypothetical | Outer | 3 | 8% | — | — |
| | | | protein encoded by | membrane | | | | |
| | | | prophage CP-933K; | | | | | |
| | | | unknown function | | | | | |
| | | Backbone | FepA/outer membrane | Outer | 1 | 2% | — | — |
| | | | receptor for ferric | membrane | | | | |
| | | | enterobactin | | | | | |
| | | | (enterochelin) and | | | | | |
| | | | colicins B and D; | | | | | |
| | | | Transport of small | | | | | |
| | | | molecules: Cations | | | | | |
| | | Backbone | MalE/maltose-binding | Periplasm | 2 | 8% | — | Mal F/ |
| | | | protein; substrate | | | | | maltose |
| | | | recognition for transport | | | | | permease, |
| | | | and chemotaxis; | | | | | MalS/alpha |
| | | | transport of small | | | | | amylase, |
| | | | molecules: | | | | | MaLY/ |
| | | | carbohydrates, organic | | | | | enzyme that |
| | | | acids, alcohols | | | | | may degrade |
| | | | | | | | | or block |
| | | | | | | | | biosynthesis |
| | | | | | | | | of |
| | | | | | | | | endogenous |
| | | | | | | | | mal inducer, |
| | | | | | | | | MalZ/ |
| | | | | | | | | maltodextrin |
| | | | | | | | | glucosidase |
| | | Backbone | TolB/protein involved | Periplasm | 1 | 4% | — | — |
| | | | in the tonb-independent | | | | | |
| | | | uptake of group A | | | | | |
| | | | colicins; colicin-related | | | | | |
| | | | functions | | | | | |
| | | Backbone | FkpA/FKBP-type | Periplasm | 1 | 6% | — | — |
| | | | peptidyl-prolyl cis-trans | | | | | |
| | | | isomerase | | | | | |
| | | | (rotamase); enzyme; | | | | | |
| | | | macromolecule | | | | | |
| | | | synthesis, modification: | | | | | |
| | | | proteins, translation, and | | | | | |
| | | | modification | | | | | |
| 181 | 182 | Backbone | YbeJ/putative | Periplasm | 1 | 6% | — | — |
| | | | periplasmic binding | | | | | |
| | | | transport protein; | | | | | |
| | | | putative transport | | | | | |
| | | Backbone | GlnH/periplasmic | Periplasm | 1 | 8% | — | GlnG/ |
| | | | glutamine-binding | | | | | response |
| | | | protein; permease; | | | | | regulator for |
| | | | transport; transport of | | | | | gln operon; |
| | | | small molecules: amino | | | | | interacts with |
| | | | acids, amines | | | | | sensor GlnL |
| | | | | | | | | GlnL/ |
| | | | | | | | | histidine |
| | | | | | | | | protein |
| | | | | | | | | kinase sensor |
| | | | | | | | | for the GlnG |
| | | | | | | | | regulator |
| | | | | | | | | Both are |
| | | | | | | | | involved in |
| | | | | | | | | glutamine |
| | | | | | | | | biosynthesis |
| 183 | 184 | Backbone | Mdh/malate | Periplasm | 1 | 4% | — | — |
| | | | dehydrogenase; enzyme; | | | | | |
| | | | energy metabolism, | | | | | |
| | | | carbon: TCA cycle | | | | | |
| 185 | 186 | Backbone | Z2267/hypothetical | Periplasm | 4 | 10% | — | — |
| | | | protein yncE precursor; | | | | | |
| | | | putative receptor | | | | | |
| 187 | 188 | Backbone | YaeC/putative | Periplasm | 1 | 6% | — | — |
| | | | lipoprotein, D- | | | | | |
| | | | methionine transport | | | | | |
| | | | protein; D-methionine- | | | | | |
| | | | binding lipoprotein metQ | | | | | |
| | | | precursor | | | | | |
| 189 | 190 | Backbone | SdhA/succinate | Periplasm | 1 | 3% | — | — |
| | | | dehydrogenase, | | | | | |
| | | | flavoprotein subunit; | | | | | |
| | | | enzyme; energy | | | | | |
| | | | metabolism, carbon: | | | | | |
| | | | TCA cycle | | | | | |
| 191 | 192 | Backbone | DppA/dipeptide | Periplasm | 1 | 2% | — | — |
| | | | transport protein; | | | | | |
| | | | transport; Transport of | | | | | |
| | | | large molecules: Protein, | | | | | |
| | | | peptide secretion | | | | | |
| 193 | 194 | Backbone | YahO/hypothetical | Periplasm | 1 | 9% | — | — |
| | | | protein; unknown | | | | | |
| | | | function | | | | | |
| 195 | 196 | O-island # 7 | Z0269/hypothetical | Periplasm | 3 | 4% | — | — |
| | | | protein; unknown | | | | | |
| | | | function (Rhs Element | | | | | |
| | | | Associated) | | | | | |
| | | Backbone | RbsB/D-ribose | Periplasm | 3 | 17% | — | — |
| | | | periplasmic binding | | | | | |
| | | | protein; Transport of | | | | | |
| | | | small molecules: | | | | | |
| | | | Carbohydrates, organic | | | | | |
| | | | acids, alcohols | | | | | |
| 197 | 198 | Backbone | OsmY/ | Periplasm | 7 | 26% | — | OsmY |
| | | | hyperosmotically | | | | | |
| | | | inducible periplasmic | | | | | |
| | | | protein; osmotic | | | | | |
| | | | adaptation | | | | | |
| 199 | 200 | Backbone | Z3065/hypothetical | Periplasm | 1 | 6% | — | — |
| | | | protein; unknown | | | | | |
| | | | function | | | | | |
| | | Backbone | Prc/carboxy-terminal | Periplasm | 1 | 2% | — | — |
| | | | protease for penicillin- | | | | | |
| | | | binding protein 3; | | | | | |
| | | | Macromolecule | | | | | |
| | | | degradation: Degradation | | | | | |
| | | | of proteins, peptides, | | | | | |
| | | | glyco | | | | | |
| 201 | 202 | Backbone | ArgT/lysine-, arginine-, | Periplasm | 1 | 6% | — | — |
| | | | ornithine-binding | | | | | |
| | | | periplasmic protein; | | | | | |
| | | | transport; Transport of | | | | | |
| | | | small molecules: Amino | | | | | |
| | | | acids, amines | | | | | |
| | | Backbone | OppA/oligopeptide | Periplasm | 5 | 8% | — | OppB/ |
| | | | transport; periplasmic | | | | | oligopeptide |
| | | | binding protein; | | | | | transport |
| | | | transport; Transport of | | | | | permease |
| | | | large molecules: Protein, | | | | | protein; |
| | | | peptide secretion | | | | | transport; |
| | | | | | | | | Transport of |
| | | | | | | | | large |
| | | | | | | | | molecules: |
| | | | | | | | | Protein, |
| | | | | | | | | peptide |
| | | | | | | | | secretion |
| | | Backbone | SodC/superoxide | Periplasm | 1 | 6% | — | — |
| | | | dismutase precursor (Cu—Zn); | | | | | |
| | | | enzyme; Protection | | | | | |
| | | | responses: Detoxification | | | | | |
| 203 | 204 | Backbone | XasA (GadC)/acid | Inner membrane | 6 | 3% | — | — |
| | | | sensitivity protein, | | | | | |
| | | | putative transporter; | | | | | |
| | | | Probable | | | | | |
| | | | glutamate/gamma- | | | | | |
| | | | aminobutyrate antiporter | | | | | |
| 205 | 206 | Backbone | PspA/phage shock | Inner membrane | 1 | 7% | — | — |
| | | | protein A; prophage and | | | | | |
| | | | phage-related functions; | | | | | |
| | | | adaptations, atypical | | | | | |
| | | | conditions; negative | | | | | |
| | | | regulatory gene for the | | | | | |
| | | | psp operon | | | | | |
| | | Backbone | AtpF/ATP synthase, F0 | Inner membrane | 1 | 8% | — | — |
| | | | sector, B chain; enzyme; | | | | | |
| | | | ATP-proton motive | | | | | |
| | | | force, interconversion | | | | | |
| | | Backbone | AtpB/membrane-bound | Inner membrane | 3 | 21% | — | — |
| | | | ATP synthase, F0 sector, | | | | | |
| | | | subunit A; enzyme; ATP- | | | | | |
| | | | proton motive force | | | | | |
| | | | interconversion | | | | | |
| 207 | 208 | Backbone | YleB/putative 2- | Inner membrane | 1 | 5% | — | YleB |
| | | | polyprenyl-6- | | | | | |
| | | | methoxyphenol | | | | | |
| | | | hydroxylase and related | | | | | |
| | | | FAD-dependent | | | | | |
| | | | oxidoreductase; | | | | | |
| | | | unknown function | | | | | |
| 209 | 210 | Backbone | CysK/cysteine synthase | Inner | 2 | 8% | — | — |
| | | | A, O-acetylserine | membrane | | | | |
| | | | sulfhydrolase A; enzyme; | | | | | |
| | | | Amino acid biosynthesis: | | | | | |
| | | | Cysteine | | | | | |
| 211 | 212 | Backbone | DnaC/chromosome | Inner | 1 | 5% | — | — |
| | | | replication; initiation and | membrane | | | | |
| | | | chain elongation; | | | | | |
| | | | putative enzyme; | | | | | |
| | | | Macromolecule | | | | | |
| | | | synthesis, modification: | | | | | |
| | | | DNA - replication, | | | | | |
| | | | repair, restr./modific'n | | | | | |
| 213 | 214 | Backbone | DsbB/reoxidizes DsbA | Inner | 1 | 8% | — | DsbA/ |
| | | | protein following | membrane | | | | protein |
| | | | formation of disulfide | | | | | disulfide |
| | | | bond in P-ring of | | | | | isomerase I, |
| | | | flagella; enzyme; Cell | | | | | essential for |
| | | | exterior constituents: | | | | | cytochrome c |
| | | | Surface | | | | | synthesis and |
| | | | structures | | | | | formate- |
| | | | | | | | | dependent |
| | | | | | | | | reduction; |
| | | | | | | | | Proteins - |
| | | | | | | | | translation |
| | | | | | | | | and |
| | | | | | | | | modification |
| 215 | 216 | Backbone | ElaB/hypothetical | Inner | 3 | 28% | — | — |
| | | | protein; unknown | membrane | | | | |
| | | | function | | | | | |
| 217 | 218 | Backbone | GatD/galactitol-1- | Inner | 1 | 4% | — | — |
| | | | phosphate | membrane | | | | |
| | | | dehydrogenase; enzyme; | | | | | |
| | | | Degradation of small | | | | | |
| | | | molecules: Carbon | | | | | |
| | | | compounds | | | | | |
| 219 | 220 | Backbone | KefC/K+ efflux | Inner membrane | 1 | 3% | — | KefC |
| | | | antiporter, glutathione- | | | | | |
| | | | regulated; transport; | | | | | |
| | | | Transport of small | | | | | |
| | | | molecules: Cations | | | | | |
| 221 | 222 | O-island # 57 | Z2112/putative ClpP- | Inner | 1 | 7% | — | — |
| | | | like protease encoded | membrane | | | | |
| | | | within prophage CP- | | | | | |
| | | | 933O; putative enzyme; | | | | | |
| | | | Macromolecule | | | | | |
| | | | degradation: Degradation | | | | | |
| | | | of proteins, peptides, | | | | | |
| | | | glyco (Phage or | | | | | |
| | | | Prophage Related) | | | | | |
| | | Backbone | LacI/transcriptional | Inner | 3 | 11% | — | — |
| | | | repressor of the lac | membrane | | | | |
| | | | operon; regulator; | | | | | |
| | | | Degradation of small | | | | | |
| | | | molecules: Carbon | | | | | |
| | | | compounds | | | | | |
| 223 | 224 | Backbone | GatZ/putative tagatose | Inner | 4 | 10% | — | — |
| | | | 6-phosphate kinase 1; | membrane | | | | |
| | | | unknown function | | | | | |
| 225 | 226 | Backbone | AcnB/aconitate hydrase | Inner | 1 | 2% | — | — |
| | | | B; Energy metabolism, | membrane | | | | |
| | | | carbon: TCA cycle | | | | | |
| 227 | 228 | Backbone | CydA/cytochrome d | Inner | 1 | 3% | — | — |
| | | | terminal oxidase, | membrane | | | | |
| | | | polypeptide subunit I; | | | | | |
| | | | Energy metabolism, | | | | | |
| | | | carbon: Electron | | | | | |
| | | | transport | | | | | |
| 229 | 230 | Backbone | CreD/tolerance to | Inner | 1 | 6% | — | — |
| | | | colicin E2; putative | membrane | | | | |
| | | | membrane; Colicin- | | | | | |
| | | | related functions | | | | | |
| 231 | 232 | Backbone | YgjD/putative O- | Inner | 1 | 5% | — | — |
| | | | sialoglycoprotein | membrane | | | | |
| | | | endopeptidase; unknown | | | | | |
| | | | function | | | | | |
| 233 | 234 | Backbone | Z5187/putative | Inner | 1 | 8% | — | — |
| | | | replicase; | membrane | | | | |
| | | | Macromolecule | | | | | |
| | | | synthesis, modification: | | | | | |
| | | | DNA - replication, | | | | | |
| | | | repair, restr./modific'n | | | | | |
| 235 | 236 | Backbone | YtfQ/putative LACI- | Inner | 1 | 4% | — | — |
| | | | type transcriptional | membrane | | | | |
| | | | regulator, unknown | | | | | |
| | | | function | | | | | |
| | | Backbone | FklB/FKBP-type 22 KD | Inner | 5 | 17% | — | — |
| | | | peptidyl-prolyl cis-trans | membrane | | | | |
| | | | isomerase (rotamase); | | | | | |
| | | | Macromolecule | | | | | |
| | | | synthesis, | | | | | |
| | | | modification:Proteins - | | | | | |
| | | | translation and | | | | | |
| | | | modification | | | | | |
| | | Backbone | RpsA/30S ribosomal | Inner | 2 | 6% | — | — |
| | | | subunit protein S1; | membrane | | | | |
| | | | structural component; | | | | | |
| | | | Macromolecule | | | | | |
| | | | synthesis, modification: | | | | | |
| | | | Ribosomal proteins | | | | | |
| | | Backbone | Ssb/ssDNA-binding | Inner | 5 | 20% | — | — |
| | | | protein; factor; | membrane | | | | |
| | | | Macromolecule | | | | | |
| | | | synthesis, modification: | | | | | |
| | | | DNA - replication, | | | | | |
| | | | repair, | | | | | |
| | | | restriction./modification | | | | | |
| 237 | 238 | Backbone | SucC/succinyl-CoA | Inner | 2 | 9% | — | — |
| | | | synthetase, beta subunit; | membrane | | | | |
| | | | enzyme; Energy | | | | | |
| | | | metabolism, carbon: | | | | | |
| | | | TCA cycle | | | | | |
| | | Backbone | RplK/50S ribosomal | Inner | 5 | 26% | — | — |
| | | | subunit protein L11; | membrane | | | | |
| | | | structural component; | | | | | |
| | | | Macromolecule | | | | | |
| | | | synthesis, modification: | | | | | |
| | | | Ribosomal proteins | | | | | |
| 239 | 240 | Backbone | TpiA/triosephosphate | Inner | 1 | 6% | — | — |
| | | | isomerase; enzyme; | membrane | | | | |
| | | | Energy metabolism, | | | | | |
| | | | carbon: Glycolysis | | | | | |
| 241 | 242 | Backbone | YgaM/hypothetical | Inner | 2 | 12% | — | — |
| | | | protein; unknown | membrane | | | | |
| | | | function | | | | | |
| | | Backbone | TrxA/thioredoxin 1; | Cytoplasm | 18 | 43% | TrxC/ | Ggt/ |
| | | | enzyme; biosynthesis of | | | | putative | biosynthesis |
| | | | cofactors, carriers: | | | | thioredoxin- | of cofactors, |
| | | | thioredoxin, | | | | like protein | carriers: |
| | | | glutaredoxin, glutathione | | | | | thioredoxin, |
| | | | | | | | | glutaredoxin, |
| | | | | | | | | glutathione |
| 243 | 244 | Backbone | DeaD/inducible ATP- | Cytoplasm | 13 | 5% | — | — |
| | | | independent RNA | | | | | |
| | | | helicase; enzyme; | | | | | |
| | | | macromolecule | | | | | |
| | | | synthesis, modification: | | | | | |
| | | | RNA synthesis, | | | | | |
| | | | modification, DNA | | | | | |
| | | | transcription | | | | | |
| | | Backbone | DpS/DNA protection | Cytoplasm | 2 | 22% | — | — |
| | | | during starvation protein; | | | | | |
| | | | global regulatory | | | | | |
| | | | functions | | | | | |
| | | Backbone | Tpx/thiol peroxidase; | Cytoplasm | 1 | 9% | — | — |
| | | | enzyme; protection | | | | | |
| | | | responses: detoxification | | | | | |
| 245 | 246 | Backbone | AceE/pyruvate | Cytoplasm | 2 | 4% | — | — |
| | | | dehydrogenase | | | | | |
| | | | (decarboxylase | | | | | |
| | | | component); enzyme; | | | | | |
| | | | energy metabolism | | | | | |
| 247 | 248 | Backbone | Gnd/gluconate-6- | Cytoplasm | 2 | 6% | — | — |
| | | | phosphate | | | | | |
| | | | dehydrogenase, | | | | | |
| | | | decarboxylating; | | | | | |
| | | | enzyme; energy | | | | | |
| | | | metabolism, carbon: | | | | | |
| | | | oxidative branch, pentose | | | | | |
| | | | pathway | | | | | |
| 249 | 250 | Backbone | MalP/maltodextrin | Cytoplasm | 3 | 5% | — | Mal F/ |
| | | | phosphorylase; enzyme; | | | | | maltose |
| | | | degradation of small | | | | | permease, |
| | | | molecules: carbon | | | | | MalS/alpha |
| | | | compounds | | | | | amylase, |
| | | | | | | | | MaLY/ |
| | | | | | | | | enzyme that |
| | | | | | | | | may degrade |
| | | | | | | | | or block |
| | | | | | | | | biosynthesis |
| | | | | | | | | of |
| | | | | | | | | endogenous |
| | | | | | | | | mal inducer, |
| | | | | | | | | MalZ/ |
| | | | | | | | | maltodextrin |
| | | | | | | | | glucosidase |
| | | Backbone | HflC/protease specific | Cytoplasm | 1 | 5% | — | HflX/GTP- |
| | | | for phage lambda cII | | | | | binding |
| | | | repressor; enzyme; | | | | | subunit of |
| | | | macromolecule | | | | | protease |
| | | | degradation: degradation | | | | | specific for |
| | | | of proteins, peptides | | | | | phage |
| | | | | | | | | lambda cII |
| | | | | | | | | repressor |
| | | Backbone | Eno/enolase; enzyme; | Cytoplasm | 2 | 7% | — | — |
| | | | energy metabolism, | | | | | |
| | | | carbon: glycolysis, | | | | | |
| | | | anaerobic respiration, | | | | | |
| | | | gluconeogenesis | | | | | |
| 251 | 252 | Backbone | MopB/GroES; 10 Kd | Cytoplasm | 1 | 13% | — | MopB |
| | | | chaperone binds to | | | | | |
| | | | Hsp60 in presence of | | | | | |
| | | | Mg-ATP, suppressing its | | | | | |
| | | | ATPase activity; folding | | | | | |
| | | | and ushering proteins: | | | | | |
| | | | Chaperones | | | | | |
| 253 | 254 | Backbone | Z3260/hypothetical | Cytoplasm | 1 | 6% | — | — |
| | | | protein; unknown | | | | | |
| | | | function; putative | | | | | |
| | | | fructose bis-phosphate | | | | | |
| | | | aldolase | | | | | |
| | | Backbone | Add/adenosine | Cytoplasm | 1 | 10% | — | — |
| | | | deaminase; enzyme; | | | | | |
| | | | central intermediary | | | | | |
| | | | metabolism: salvage of | | | | | |
| | | | nucleosides and | | | | | |
| | | | nucleotides | | | | | |
| | | Backbone | DnaK/chaperone | Cytoplasm | 4 | 9% | — | Z2654/ |
| | | | Hsp70; DNA | | | | | putative |
| | | | biosynthesis; | | | | | chaperone |
| | | | autoregulated heat shock | | | | | distantly |
| | | | proteins; folding and | | | | | related to |
| | | | ushering proteins: | | | | | Hsp70 |
| | | | chaperones | | | | | |
| 255 | 256 | Backbone | Pnp/polynucleotide | Cytoplasm | 2 | 6% | — | — |
| | | | phosphorylase; cytidylate | | | | | |
| | | | kinase; macromolecule | | | | | |
| | | | synthesis, modification: | | | | | |
| | | | RNA synthesis, | | | | | |
| | | | modification, DNA | | | | | |
| | | | transcription | | | | | |
| | | Backbone | RpsE/30S ribosomal | Cytoplasm | 2 | 13% | — | — |
| | | | subunit protein S5; | | | | | |
| | | | protein synthesis, | | | | | |
| | | | modification | | | | | |
| | | Backbone | RpsG/30S ribosomal | Cytoplasm | 1 | 8% | — | — |
| | | | subunit protein S7, | | | | | |
| | | | initiates assembly; | | | | | |
| | | | protein synthesis, | | | | | |
| | | | modification | | | | | |
| | | Backbone | RpsH/30S ribosomal | Cytoplasm | 1 | 12% | — | — |
| | | | subunit protein S8, | | | | | |
| | | | initiates assembly; | | | | | |
| | | | protein synthesis, | | | | | |
| | | | modification | | | | | |
| 257 | 258 | Backbone | TnaA/tryptophanase; | Cytoplasm | 3 | 9% | — | — |
| | | | degradation of small | | | | | |
| | | | molecules: amino acids | | | | | |
| | | Backbone | LpdA/lipoamide | Cytoplasm | 4 | 17% | — | — |
| | | | dehydrogenase (NADH); | | | | | |
| | | | component of 2- | | | | | |
| | | | oxodehydrogenase and | | | | | |
| | | | pyruvate complexes; L- | | | | | |
| | | | protein of glycine | | | | | |
| | | | cleavage complex; | | | | | |
| | | | enzyme; energy | | | | | |
| | | | metabolism, carbon: | | | | | |
| | | | pyruvate dehydrogenase | | | | | |
| | | Backbone | TufA/protein chain | Cytoplasm | 2 | 10% | — | — |
| | | | elongation factor EF-Tu; | | | | | |
| | | | macromolecule | | | | | |
| | | | synthesis, modification: | | | | | |
| | | | proteins - translation and | | | | | |
| | | | modification | | | | | |
| | | Backbone | Ftn (FtnA)/ferritin (an | Cytoplasm | 1 | 9% | — | — |
| | | | iron storage protein); | | | | | |
| | | | carrier; transport of small | | | | | |
| | | | molecules: cations | | | | | |
| | | Backbone | DapD/2,3,4,5- | Cytoplasm | 1 | 5% | — | DapD |
| | | | tetrahydropyridine-2- | | | | | |
| | | | carboxylate N- | | | | | |
| | | | succinyltransferase; | | | | | |
| | | | enzyme; amino acid | | | | | |
| | | | biosynthesis: lysine | | | | | |
| 259 | 260 | Backbone | AceF/pyruvate | Cytoplasm | 3 | 6% | — | — |
| | | | dehydrogenase (dihydro- | | | | | |
| | | | lipoyltransacetylase | | | | | |
| | | | component); enzyme; | | | | | |
| | | | energy metabolism, | | | | | |
| | | | carbon: pyruvate | | | | | |
| | | | dehydrogenase | | | | | |
| | | Backbone | AdhP/alcohol | Cytoplasm | 1 | 7% | — | AdhP |
| | | | dehydrogenase; enzyme; | | | | | |
| | | | energy metabolism, | | | | | |
| | | | carbon: anaerobic | | | | | |
| | | | respiration | | | | | |
| 261 | 262 | Backbone | Z1099/hypothetical | Cytoplasm | 1 | 13% | — | — |
| | | | protein; unknown | | | | | |
| | | | function | | | | | |
| | | Backbone | Tsf/protein chain | Cytoplasm | 1 | 7% | — | — |
| | | | elongation factor EF-Ts; | | | | | |
| | | | macromolecule | | | | | |
| | | | synthesis, modification: | | | | | |
| | | | proteins - translation and | | | | | |
| | | | modification | | | | | |
| | | Backbone | RpoE/RNA polymerase, | Cytoplasm | 1 | 9% | — | — |
| | | | sigma-E factor; heat | | | | | |
| | | | shock and oxidative | | | | | |
| | | | stress; regulator; global | | | | | |
| | | | regulatory functions | | | | | |
| 263 | 264 | Backbone | YqjD/hypothetical | Cytoplasm | 1 | 18% | — | — |
| | | | protein; unknown | | | | | |
| | | | function | | | | | |
| | | Backbone | FabG/3-oxoacyl-[acyl- | Cytoplasm | 1 | 10% | — | — |
| | | | carrier-protein] | | | | | |
| | | | reductases; enzyme; fatty | | | | | |
| | | | acid and phosphatidic | | | | | |
| | | | acid biosynthesis | | | | | |
| 265 | 266 | Backbone | CreA/hypothetical | Cytoplasm | 1 | 9% | — | — |
| | | | protein; unknown | | | | | |
| | | | function | | | | | |
| | | Backbone | LacZ/beta-D- | Cytoplasm | 1 | 6% | — | — |
| | | | galactosidase; enzyme; | | | | | |
| | | | degradation of small | | | | | |
| | | | molecules: carbon | | | | | |
| | | | compounds | | | | | |
| 267 | 268 | Backbone | OrdL/putative | Cytoplasm | 1 | 4% | Z2702/ | YhjL, Z2723, |
| | | | oxidoreductase; function | | | | putative | Z3401/ |
| | | | unknown | | | | oxido- | putative |
| | | | | | | | reductase, | oxido- |
| | | | | | | | Fe—S subunit | reductase |
| | | Backbone | FldA/flavodoxin 1; | Cytoplasm | 1 | 11% | — | Z4018/ |
| | | | enzyme; energy | | | | | putative |
| | | | metabolism, carbon: | | | | | flavodoxin |
| | | | electron transport | | | | | |
| | | Backbone | FusA/GTP-binding | Cytoplasm | 1 | 2% | — | — |
| | | | protein chain elongation | | | | | |
| | | | factor EF-G; | | | | | |
| | | | macromolecule | | | | | |
| | | | synthesis, modification: | | | | | |
| | | | proteins - translation and | | | | | |
| | | | modification | | | | | |
| | | Backbone | RpoA/RNA | Cytoplasm | 1 | 4% | — | — |
| | | | polymerase, alpha | | | | | |
| | | | subunit; enzyme; | | | | | |
| | | | macromolecule | | | | | |
| | | | synthesis, modification: | | | | | |
| | | | RNA synthesis, | | | | | |
| | | | modification, DNA | | | | | |
| | | | transcription | | | | | |
| 269 | 270 | Backbone | YhdH/putative | Cytoplasm | 1 | 4% | — | YgjL, YidS, |
| | | | dehydrogenase; unknown | | | | | YliL, Z3775, |
| | | | function | | | | | Z4220/ |
| | | | | | | | | putative |
| | | | | | | | | dehydrogenase |
| 271 | 272 | Backbone | SucA/2-oxoglutarate | Cytoplasm | 1 | 2% | — | — |
| | | | dehydrogenase | | | | | |
| | | | (decarboxylase | | | | | |
| | | | component); enzyme; | | | | | |
| | | | energy metabolism, | | | | | |
| | | | carbon: TCA cycle | | | | | |
| | | Backbone | AdhE/CoA-linked | Cytoplasm | 1 | 2% | — | — |
| | | | acetaldehyde | | | | | |
| | | | dehydrogenase and iron- | | | | | |
| | | | dependent alcohol | | | | | |
| | | | dehydrogenase; | | | | | |
| | | | pyruvate-formate-lyase | | | | | |
| | | | deactivase; enzyme; | | | | | |
| | | | energy metabolism, | | | | | |
| | | | carbon: fermentation | | | | | |
| | | Backbone | Pgk/phosphoglycerate | Cytoplasm | 1 | 6% | — | — |
| | | | kinase; enzyme; energy | | | | | |
| | | | metabolism, carbon: | | | | | |
| | | | glycolysis | | | | | |
| | | Backbone | RplO/50S ribosomal | Cytoplasm | 1 | 11% | — | — |
| | | | protein L15; protein | | | | | |
| | | | synthesis, modification | | | | | |
| | | Backbone | RplN/50S ribosomal | Cytoplasm | 2 | 33% | — | — |
| | | | protein L14; protein | | | | | |
| | | | synthesis, modification | | | | | |
| | | Backbone | RplL/50S ribosomal | Cytoplasm | 2 | 10% | — | — |
| | | | protein L7/L12; protein | | | | | |
| | | | synthesis, modification | | | | | |
| | | Backbone | RplJ/50S ribosomal | Cytoplasm | 1 | 9% | — | — |
| | | | protein L10; protein | | | | | |
| | | | synthesis, modification | | | | | |
| | | Backbone | RplF/50S ribosomal | Cytoplasm | 1 | 9% | — | — |
| | | | protein L6; protein | | | | | |
| | | | synthesis, modification | | | | | |
| | | Backbone | RplC/50S ribosomal | Cytoplasm | 1 | 10% | — | — |
| | | | protein L3; protein | | | | | |
| | | | synthesis, modification | | | | | |
| | | Backbone | YnaF/putative universal | Cytoplasm | 1 | 11% | — | — |
| | | | stress protein; unknown | | | | | |
| | | | function | | | | | |
| 273 | 274 | Backbone | MalQ/4-alpha- | Cytoplasm | 2 | 6% | — | Mal F/ |
| | | | glucanotransferase | | | | | maltose |
| | | | (amylomaltase); enzyme; | | | | | permease, |
| | | | macromolecule | | | | | MalS/alpha |
| | | | degradation: degradation | | | | | amylase, |
| | | | of polysaccharides | | | | | MaLY/ |
| | | | | | | | | enzyme that |
| | | | | | | | | may degrade |
| | | | | | | | | or block |
| | | | | | | | | biosynthesis |
| | | | | | | | | of |
| | | | | | | | | endogenous |
| | | | | | | | | mal inducer, |
| | | | | | | | | MalZ/ |
| | | | | | | | | maltodextrin |
| | | | | | | | | glucosidase |
| 275 | 276 | Backbone | YhbP/hypothetical | Cytoplasm | 1 | 8% | — | — |
| | | | protein; unknown | | | | | |
| | | | function | | | | | |
| 277 | 278 | Backbone | OsmC/osmotically | Cytoplasm | 1 | 15% | — | OsmY/ |
| | | | inducible protein; | | | | | hyperosmotically |
| | | | phenotype; osmotic | | | | | inducible |
| | | | adaptation | | | | | protein; |
| | | | | | | | | osmotic |
| | | | | | | | | adaptation |
| 279 | 280 | Backbone | Hns/DNA-binding | Cytoplasm | 3 | 17% | — | — |
| | | | protein HLP-II (HU, | | | | | |
| | | | BH2, HD, NS); | | | | | |
| | | | pleiotropic regulator; | | | | | |
| | | | regulator; basic proteins - | | | | | |
| | | | synthesis, | | | | | |
| | | | modification | | | | | |
| 281 | 282 | Backbone | SbmC/hypothetical | Cytoplasm | 1 | 12% | — | — |
| | | | protein; unknown | | | | | |
| | | | function | | | | | |
| | | Backbone | AtpA/membrane-bound | Cytoplasm | 11 | 23% | — | — |
| | | | ATP synthase, F1 sector, | | | | | |
| | | | alpha-subunit; enzyme; | | | | | |
| | | | ATP-proton motive force | | | | | |
| | | | interconversion | | | | | |
| | | Backbone | AtpG/membrane-bound | Cytoplasm | 1 | 4% | — | — |
| | | | ATP synthase, F1 sector, | | | | | |
| | | | gamma-subunit; | | | | | |
| | | | enzyme; ATP-proton | | | | | |
| | | | motive force | | | | | |
| | | | interconversion | | | | | |
| | | Backbone | MopA/GroEL, | Cytoplasm | 6 | 17% | — | — |
| | | | chaperone Hsp60, | | | | | |
| | | | peptide-dependent | | | | | |
| | | | ATPase, heat shock | | | | | |
| | | | protein; Folding and | | | | | |
| | | | ushering proteins: | | | | | |
| | | | Chaperones | | | | | |
| | | Backbone | Crp/cyclic AMP | Cytoplasm | 2 | 12% | — | — |
| | | | receptor protein; | | | | | |
| | | | regulator; Global | | | | | |
| | | | regulatory functions | | | | | |
| | | Backbone | CspA/cold shock | Cytoplasm | 1 | 20% | — | — |
| | | | protein 7.4, | | | | | |
| | | | transcriptional activator | | | | | |
| | | | of hns; regulator; | | | | | |
| | | | Adaptations, atypical | | | | | |
| | | | conditions | | | | | |
| | | Backbone | CspC/cold shock | Cytoplasm | 3 | 20% | 5′of cspC | — |
| | | | protein; unknown | | | | | |
| | | | function | | | | | |
| 283 | 284 | Backbone | CysN/ATP-sulfurylase | Cytoplasm | 1 | 3% | — | CysD/ |
| | | | (ATP:sulfate | | | | | ATP:sulfurylase |
| | | | adenylyltransferase), | | | | | (ATP:sulfate |
| | | | subunit 1, probably a | | | | | adenylyltransferase), |
| | | | GTPase; enzyme; Central | | | | | subunit 2; |
| | | | intermediary metabolism: | | | | | enzyme; |
| | | | Sulfur metabolism | | | | | Central |
| | | | | | | | | intermediary |
| | | | | | | | | metabolism: |
| | | | | | | | | Sulfur |
| | | | | | | | | metabolism |
| | | Backbone | HupA/DNA-binding | Cytoplasm | 4 | 32% | — | — |
| | | | protein HU-alpha (HU- | | | | | |
| | | | 2); Basic proteins - | | | | | |
| | | | synthesis, modification | | | | | |
| | | Backbone | FrdB/fumarate | Cytoplasm | 1 | 4% | — | — |
| | | | reductase, anaerobic, | | | | | |
| | | | iron-sulfur protein | | | | | |
| | | | subunit; enzyme; Energy | | | | | |
| | | | metabolism, carbon: | | | | | |
| | | | Anaerobic | | | | | |
| | | | respiration | | | | | |
| | | Backbone | GapA/glyceraldehyde- | Cytoplasm | 5 | 22% | — | — |
| | | | 3-phosphate | | | | | |
| | | | dehydrogenase A; | | | | | |
| | | | enzyme; Energy | | | | | |
| | | | metabolism, carbon: | | | | | |
| | | | Glycolysis | | | | | |
| 285 | 286 | Backbone | FolE/GTP | Cytoplasm | 2 | 13% | — | FolE |
| | | | cyclohydrolase I; | | | | | |
| | | | enzyme; Biosynthesis of | | | | | |
| | | | cofactors, carriers: Folic | | | | | |
| | | | acid | | | | | |
| | | Backbone | GlnA/glutamine | Cytoplasm | 1 | 3% | — | GlnG/ |
| | | | synthetase; enzyme; | | | | | response |
| | | | Amino acid biosynthesis: | | | | | regulator for |
| | | | Glutamine | | | | | gln operon; |
| | | | | | | | | interacts with |
| | | | | | | | | sensor GlnL |
| | | | | | | | | GlnL/ |
| | | | | | | | | histidine |
| | | | | | | | | protein |
| | | | | | | | | kinase sensor |
| | | | | | | | | for the GlnG |
| | | | | | | | | regulator |
| | | | | | | | | Both are |
| | | | | | | | | involved in |
| | | | | | | | | glutamine |
| | | | | | | | | biosynthesis |
| 287 | 288 | Backbone | GpmA/ | Cytoplasm | 2 | 11% | — | — |
| | | | phosphoglyceromutase 1; | | | | | |
| | | | enzyme; Energy | | | | | |
| | | | metabolism, carbon: | | | | | |
| | | | Glycolysis | | | | | |
| | | Backbone | GrpE/phage lambda | Cytoplasm | 1 | 8% | — | — |
| | | | replication; host DNA | | | | | |
| | | | synthesis; | | | | | |
| | | | heat shock protein; | | | | | |
| | | | protein repair; IS, phage, | | | | | |
| | | | Tn; Other or unknown | | | | | |
| | | Backbone | HisB/ | Cytoplasm | 1 | 5% | — | HisS/ |
| | | | imidazoleglycerolphosphate | | | | | histidine |
| | | | dehydratase and | | | | | tRNA |
| | | | histidinol-phosphate | | | | | synthetase; |
| | | | phosphatase; enzyme; | | | | | enzyme; |
| | | | Amino acid biosynthesis: | | | | | Amino acyl |
| | | | Histidine | | | | | tRNA syn; |
| | | | | | | | | tRNA |
| | | | | | | | | modification |
| | | Backbone | HslV/heat shock protein | Cytoplasm | 1 | 7% | — | — |
| | | | hslVU, proteasome- | | | | | |
| | | | related peptidase subunit; | | | | | |
| | | | enzyme; macromolecule | | | | | |
| | | | degradation: Degradation | | | | | |
| | | | of proteins, peptides, | | | | | |
| | | | glyco | | | | | |
| | | Backbone | IbpA/heat shock | Cytoplasm | 1 | 9% | — | — |
| | | | protein; factor; | | | | | |
| | | | Adaptations, atypical | | | | | |
| | | | conditions | | | | | |
| | | Backbone | IbpB/heat shock | Cytoplasm | 2 | 8% | — | — |
| | | | protein; factor; | | | | | |
| | | | Adaptations, atypical | | | | | |
| | | | conditions | | | | | |
| 289 | 290 | Backbone | InfC/Initiation factor | Cytoplasm | 2 | 34% | — | — |
| | | | IF-3; Macromolecule | | | | | |
| | | | synthesis, modification: | | | | | |
| | | | Proteins - translation and | | | | | |
| | | | modification | | | | | |
| 291 | 292 | Backbone | HimD/integration host | Cytoplasm | 2 | 13% | — | — |
| | | | factor (IHF), beta | | | | | |
| | | | subunit; site-specific | | | | | |
| | | | recombination; factor; | | | | | |
| | | | Macromolecule | | | | | |
| | | | synthesis, modification: | | | | | |
| | | | DNA - replication, | | | | | |
| | | | repair, restr./modific'n | | | | | |
| | | Backbone | AdK/adenylate kinase | Cytoplasm | 4 | 12% | — | — |
| | | | activity; pleiotropic | | | | | |
| | | | effects on glycerol-3- | | | | | |
| | | | phosphate | | | | | |
| | | | acyltransferase activity; | | | | | |
| | | | enzyme; Nucleotide | | | | | |
| | | | biosynthesis: Purine | | | | | |
| | | | ribonucleotide | | | | | |
| | | | biosynthesis | | | | | |
| | | Backbone | MalK/ATP-binding | Cytoplasm | 1 | 3% | — | Mal F/ |
| | | | component of transport | | | | | maltose |
| | | | system for maltose; | | | | | permease, |
| | | | transport; Transport of | | | | | MalS/alpha |
| | | | small molecules: | | | | | amylase, |
| | | | Carbohydrates, organic | | | | | MaLY/ |
| | | | acids, alcohols | | | | | enzyme that |
| | | | | | | | | may degrade |
| | | | | | | | | or block |
| | | | | | | | | biosynthesis |
| | | | | | | | | of |
| | | | | | | | | endogenous |
| | | | | | | | | mal inducer, |
| | | | | | | | | MalZ/ |
| | | | | | | | | maltodextrin |
| | | | | | | | | glucosidase |
| 293 | 294 | Backbone | MukE/hypothetical | Cytoplasm | 1 | 9% | — | — |
| | | | protein; Unknown | | | | | |
| | | | function | | | | | |
| | | Backbone | NuoB/NADH | Cytoplasm | 1 | 4% | — | NuoL/ |
| | | | dehydrogenase I chain B; | | | | | NADH de- |
| | | | enzyme; Energy | | | | | hydrogenase |
| | | | metabolism, carbon: | | | | | I chain L; |
| | | | Aerobic respiration | | | | | enzyme; |
| | | | | | | | | Energy |
| | | | | | | | | metabolism, |
| | | | | | | | | carbon: |
| | | | | | | | | Aerobic |
| | | | | | | | | respiration |
| | | | | | | | | NuoM/ |
| | | | | | | | | NADH de- |
| | | | | | | | | hydrogenase |
| | | | | | | | | I chain M; |
| | | | | | | | | enzyme; |
| | | | | | | | | Energy |
| | | | | | | | | metabolism, |
| | | | | | | | | carbon: |
| | | | | | | | | Aerobic |
| | | | | | | | | respiration |
| | | Backbone | NuoG/NADH | Cytoplasm | 1 | 1% | — | NuoL/ |
| | | | dehydrogenase I chain G; | | | | | NADH de- |
| | | | enzyme; Energy | | | | | hydrogenase |
| | | | metabolism, carbon: | | | | | I chain L; |
| | | | Aerobic respiration | | | | | enzyme; |
| | | | | | | | | Energy |
| | | | | | | | | metabolism, |
| | | | | | | | | carbon: |
| | | | | | | | | Aerobic |
| | | | | | | | | respiration |
| | | | | | | | | NuoM/ |
| | | | | | | | | NADH de- |
| | | | | | | | | hydrogenase |
| | | | | | | | | I chain M; |
| | | | | | | | | enzyme; |
| | | | | | | | | Energy |
| | | | | | | | | metabolism, |
| | | | | | | | | carbon: |
| | | | | | | | | Aerobic |
| | | | | | | | | respiration |
| | | Backbone | SucB/2-oxoglutarate | Cytoplasm | 7 | 12% | — | — |
| | | | dehydrogenase (dihydro- | | | | | |
| | | | lipoyltranssuccinase E2 | | | | | |
| | | | component); enzyme; | | | | | |
| | | | Energy metabolism, | | | | | |
| | | | carbon: TCA cycle | | | | | |
| 295 | 296 | Backbone | PckA/ | Cytoplasm | 1 | 1% | — | — |
| | | | phosphoenolpyruvate | | | | | |
| | | | carboxykinase; enzyme; | | | | | |
| | | | Central intermediary | | | | | |
| | | | metabolism: | | | | | |
| | | | Gluconeogenesis | | | | | |
| | | Backbone | PPk/polyphosphate | Cytoplasm | 1 | 3% | — | — |
| | | | kinase; enzyme; Central | | | | | |
| | | | intermediary metabolism: | | | | | |
| | | | Phosphorus compounds | | | | | |
| 297 | 298 | Backbone | ProQ/ProQ protein that | Cytoplasm | 1 | 30% | — | — |
| | | | influences osmotic | | | | | |
| | | | activation of ProP; | | | | | |
| | | | putative factor; Transport | | | | | |
| | | | of small molecules: | | | | | |
| | | | Amino acids, amines | | | | | |
| | | Backbone | PyrG/CTP synthetase; | Cytoplasm | 1 | 2% | — | — |
| | | | enzyme; Central | | | | | |
| | | | intermediary metabolism: | | | | | |
| | | | Nucleotide | | | | | |
| | | | interconversions | | | | | |
| | | O-island # 57 | Z2118/putative | Cytoplasm | 1 | 14% | — | — |
| | | | endopeptidase Rz of | | | | | |
| | | | prophage CP-933O; | | | | | |
| | | | putative enzyme; Lysis | | | | | |
| | | | (Phage or Prophage | | | | | |
| | | | Related) | | | | | |
| 299 | 300 | O-island # 50 | Z1824/hypothetical | Cytoplasm | 1 | 1% | — | — |
| | | | protein encoded by | | | | | |
| | | | prophage CP-933N; | | | | | |
| | | | unknown function | | | | | |
| | | Backbone | FumB/fumarase B = | Cytoplasm | 1 | 2% | — | — |
| | | | fumarate hydratase Class | | | | | |
| | | | I; anaerobic isozyme; | | | | | |
| | | | enzyme; Energy | | | | | |
| | | | metabolism, carbon: | | | | | |
| | | | TCA cycle | | | | | |
| | | Backbone | AceA/isocitrate lyase; | Cytoplasm | 1 | 4% | — | — |
| | | | enzyme; Central | | | | | |
| | | | intermediary metabolism: | | | | | |
| | | | Glyoxylate bypass | | | | | |
| | | Backbone | TopA/DNA | Cytoplasm | 1 | 1% | — | TopA |
| | | | topoisomerase type I, | | | | | |
| | | | omega protein; | | | | | |
| | | | Macromolecule | | | | | |
| | | | synthesis, modification: | | | | | |
| | | | DNA - replication, | | | | | |
| | | | repair, restr./modific'n | | | | | |
| | | Backbone | PepD/aminoacyl- | Cytoplasm | 2 | 5% | — | — |
| | | | histidine dipeptidase | | | | | |
| | | | (peptidase D); | | | | | |
| | | | Macromolecule | | | | | |
| | | | degradation: Degradation | | | | | |
| | | | of proteins, peptides, | | | | | |
| | | | glyco | | | | | |
| | | Backbone | Udp/uridine | Cytoplasm | 1 | 5% | — | — |
| | | | phosphorylase; Central | | | | | |
| | | | intermediary metabolism: | | | | | |
| | | | Salvage of nucleosides | | | | | |
| | | | and nucleotides | | | | | |
| 301 | 302 | Backbone | YgaU/hypothetical | Cytoplasm | 6 | 39% | — | — |
| | | | protein; unknown | | | | | |
| | | | function | | | | | |
| | | Backbone | DnaJ/chaperone with | Cytoplasm | 2 | 4% | — | — |
| | | | DnaK; heat shock | | | | | |
| | | | protein; Folding and | | | | | |
| | | | ushering proteins: | | | | | |
| | | | Chaperones | | | | | |
| 303 | 304 | Backbone | Crr/PTS system, | Cytoplasm | 4 | 62% | — | — |
| | | | glucose-specific IIA | | | | | |
| | | | component; Transport of | | | | | |
| | | | small molecules: | | | | | |
| | | | Carbohydrates, organic | | | | | |
| | | | acids, alcohols | | | | | |
| 305 | 306 | O-island # 122 | Z4317/unknown protein | Cytoplasm | 1 | 1% | — | — |
| | | | encoded by ISEc8; | | | | | |
| | | | Unknown function | | | | | |
| | | | (Insertion Sequence | | | | | |
| | | | Associated) | | | | | |
| 307 | 308 | Backbone | Z1419/hypothetical | Cytoplasm | 1 | 6% | — | — |
| | | | protein; unknown | | | | | |
| | | | function | | | | | |
| 309 | 310 | Backbone | yjgF/hypothetical | Cytoplasm | 1 | 8% | — | — |
| | | | protein; unknown | | | | | |
| | | | function | | | | | |
| 311 | 312 | Backbone | PpiB/peptidyl-prolyl | Cytoplasm | 1 | 8% | — | — |
| | | | cis-trans isomerase B | | | | | |
| | | | (rotamase B); | | | | | |
| | | | Macromolecule | | | | | |
| | | | synthesis, modification: | | | | | |
| | | | Proteins - translation and | | | | | |
| | | | modification | | | | | |
| 313 | 314 | Backbone | YlbA/hypothetical | Cytoplasm | 1 | 4% | — | — |
| | | | proteins; unknown | | | | | |
| | | | function | | | | | |
| 315 | 316 | Backbone | ChaC/cation transport | Cytoplasm | 1 | 8% | — | — |
| | | | regulator; Transport of | | | | | |
| | | | small molecules: Cations | | | | | |
| 317 | 318 | Backbone | SgaU/putative | Cytoplasm | 1 | 6% | — | SgaB/ |
| | | | hexulose-6-phosphate | | | | | hypothetical |
| | | | isomerase; putative | | | | | protein; |
| | | | enzyme; Central | | | | | unknown |
| | | | intermediary | | | | | function |
| | | | metabolism: Pool, | | | | | |
| | | | multipurpose | | | | | |
| | | | conversions of | | | | | |
| | | | intermediary metabolites | | | | | |
| 319 | 320 | Backbone | MelA/alpha- | Cytoplasm | 1 | 2% | — | — |
| | | | galactosidase; enzyme; | | | | | |
| | | | Degradation of small | | | | | |
| | | | molecules: Carbon | | | | | |
| | | | compounds | | | | | |
| | | Backbone | Z2778/putative | Cytoplasm | 1 | 3% | — | — |
| | | | aldehyde dehydrogenase; | | | | | |
| | | | unknown function | | | | | |
| | | Backbone | KatE/catalase; | Cytoplasm | 1 | 2% | — | — |
| | | | hydroperoxidase | | | | | |
| | | | HPII(III); enzyme; | | | | | |
| | | | Protection responses: | | | | | |
| | | | detoxification | | | | | |
| | | Backbone | RplY/50S ribosomal | Cytoplasm | 1 | 16% | — | — |
| | | | subunit protein L25; | | | | | |
| | | | structural component; | | | | | |
| | | | Macromolecule | | | | | |
| | | | synthesis, modification: | | | | | |
| | | | Ribosomal proteins | | | | | |
| 321 | 322 | Backbone | RhlB/putative ATP- | Cytoplasm | 1 | 2% | — | — |
| | | | dependent RNA helicase; | | | | | |
| | | | unknown function | | | | | |
| | | Backbone | Z0516/riboflavin | Cytoplasm | 1 | 10% | — | — |
| | | | synthase subunit beta; | | | | | |
| | | | 6,7-dimethyl-8- | | | | | |
| | | | ribityllumazine synthase/ | | | | | |
| | | | note = DMRL₋ synthase; | | | | | |
| | | | enzyme; Biosynthesis of | | | | | |
| | | | cofactors, carriers: | | | | | |
| | | | Riboflavin | | | | | |
| | | Backbone | RplA/50S ribosomal | Cytoplasm | 10 | 52% | — | — |
| | | | subunit protein L1, | | | | | |
| | | | regulates synthesis of L1 | | | | | |
| | | | and L11; structural | | | | | |
| | | | component; | | | | | |
| | | | Macromolecule | | | | | |
| | | | synthesis, modification: | | | | | |
| | | | Ribosomal proteins | | | | | |
| | | Backbone | RplP/50S ribosomal | Cytoplasm | 1 | 12% | — | — |
| | | | subunit protein L16; | | | | | |
| | | | structural component; | | | | | |
| | | | Macromolecule | | | | | |
| | | | synthesis, modification: | | | | | |
| | | | Ribosomal proteins | | | | | |
| | | Backbone | RplQ/50S ribosomal | Cytoplasm | 2 | 24% | — | — |
| | | | subunit protein L17; | | | | | |
| | | | structural component; | | | | | |
| | | | Macromolecule | | | | | |
| | | | synthesis, modification: | | | | | |
| | | | Ribosomal proteins | | | | | |
| | | Backbone | RplR/50S ribosomal | Cytoplasm | 2 | 9% | — | — |
| | | | subunit protein L18; | | | | | |
| | | | structural component; | | | | | |
| | | | Macromolecule | | | | | |
| | | | synthesis, modification: | | | | | |
| | | | Ribosomal proteins | | | | | |
| | | Backbone | RplS/50S ribosomal | Cytoplasm | 2 | 23% | — | — |
| | | | subunit protein L19; | | | | | |
| | | | structural component; | | | | | |
| | | | Macromolecule | | | | | |
| | | | synthesis, modification: | | | | | |
| | | | Ribosomal proteins | | | | | |
| | | Backbone | RplB/50S ribosomal | Cytoplasm | 1 | 5% | — | — |
| | | | subunit protein L2; | | | | | |
| | | | structural component; | | | | | |
| | | | Macromolecule | | | | | |
| | | | synthesis, | | | | | |
| | | | modification: Ribosomal | | | | | |
| | | | proteins | | | | | |
| | | Backbone | RplU/50S ribosomal | Cytoplasm | 1 | 14% | — | — |
| | | | subunit protein L21; | | | | | |
| | | | structural component; | | | | | |
| | | | Macromolecule | | | | | |
| | | | synthesis, modification: | | | | | |
| | | | Ribosomal proteins | | | | | |
| | | Backbone | RplX/50S ribosomal | Cytoplasm | 6 | 32% | — | — |
| | | | subunit protein L24; | | | | | |
| | | | structural component; | | | | | |
| | | | Macromolecule | | | | | |
| | | | synthesis, modification: | | | | | |
| | | | Ribosomal proteins | | | | | |
| | | Backbone | RpmA/50S ribosomal | Cytoplasm | 1 | 11% | — | — |
| | | | subunit protein L27; | | | | | |
| | | | structural component; | | | | | |
| | | | Macromolecule | | | | | |
| | | | synthesis, modification: | | | | | |
| | | | Ribosomal proteins | | | | | |
| | | Backbone | RpmB/50S ribosomal | Cytoplasm | 1 | 15% | — | — |
| | | | subunit protein L28; | | | | | |
| | | | structural component; | | | | | |
| | | | Macromolecule | | | | | |
| | | | synthesis, modification: | | | | | |
| | | | Ribosomal proteins | | | | | |
| | | Backbone | RplD/50S ribosomal | Cytoplasm | 4 | 21% | — | — |
| | | | subunit protein L4, | | | | | |
| | | | regulates expression of | | | | | |
| | | | S10 operon; structural | | | | | |
| | | | component; | | | | | |
| | | | Macromolecule | | | | | |
| | | | synthesis, modification: | | | | | |
| | | | Ribosomal proteins | | | | | |
| | | Backbone | RplE/50S ribosomal | Cytoplasm | 2 | 9% | — | — |
| | | | subunit protein L5; | | | | | |
| | | | structural component; | | | | | |
| | | | Macromolecule | | | | | |
| | | | synthesis, | | | | | |
| | | | modification: Ribosomal | | | | | |
| | | | proteins | | | | | |
| | | Backbone | RplL/50S ribosomal | Cytoplasm | 8 | 38% | — | — |
| | | | subunit protein L7/L12; | | | | | |
| | | | structural component; | | | | | |
| | | | Macromolecule | | | | | |
| | | | synthesis, modification: | | | | | |
| | | | Ribosomal proteins | | | | | |
| | | Backbone | RpiA/ribosephosphate | Cytoplasm | 2 | 17% | — | — |
| | | | isomerase, constitutive; | | | | | |
| | | | enzyme; Central | | | | | |
| | | | intermediary metabolism: | | | | | |
| | | | Non-oxidative branch, | | | | | |
| | | | pentose pathway | | | | | |
| | | Backbone | Frr/ribosome releasing | Cytoplasm | 1 | 11% | — | — |
| | | | factor; factor; | | | | | |
| | | | Macromolecule | | | | | |
| | | | synthesis, modification: | | | | | |
| | | | Proteins - translation and | | | | | |
| | | | modification | | | | | |
| | | Backbone | RpsJ/30S ribosomal | Cytoplasm | 3 | 40% | — | — |
| | | | subunit protein S10; | | | | | |
| | | | structural component; | | | | | |
| | | | Macromolecule | | | | | |
| | | | synthesis, modification: | | | | | |
| | | | Ribosomal proteins | | | | | |
| | | Backbone | RpsK/30S ribosomal | Cytoplasm | 2 | 18% | — | — |
| | | | subunit protein S11; | | | | | |
| | | | structural component; | | | | | |
| | | | Macromolecule | | | | | |
| | | | synthesis, modification: | | | | | |
| | | | Ribosomal proteins | | | | | |
| | | Backbone | RpsN/30S ribosomal | Cytoplasm | 1 | 12% | — | — |
| | | | subunit protein S14; | | | | | |
| | | | structural component; | | | | | |
| | | | Macromolecule | | | | | |
| | | | synthesis, modification: | | | | | |
| | | | Ribosomal proteins | | | | | |
| | | Backbone | RpsP/30S ribosomal | Cytoplasm | 6 | 41% | — | — |
| | | | subunit protein S16; | | | | | |
| | | | structural component; | | | | | |
| | | | Macromolecule | | | | | |
| | | | synthesis, modification: | | | | | |
| | | | Ribosomal proteins | | | | | |
| | | Backbone | RpsQ/30S ribosomal | Cytoplasm | 1 | 8% | — | — |
| | | | subunit protein S17; | | | | | |
| | | | structural component; | | | | | |
| | | | Macromolecule | | | | | |
| | | | synthesis, modification: | | | | | |
| | | | Ribosomal proteins | | | | | |
| | | Backbone | RpsS/30S ribosomal | Cytoplasm | 2 | 10% | — | — |
| | | | subunit protein S19; | | | | | |
| | | | structural component; | | | | | |
| | | | Macromolecule | | | | | |
| | | | synthesis, modification: | | | | | |
| | | | Ribosomal proteins | | | | | |
| | | Backbone | RpsB/30S ribosomal | Cytoplasm | 1 | 5% | — | — |
| | | | subunit protein S2; | | | | | |
| | | | structural component; | | | | | |
| | | | Macromolecule | | | | | |
| | | | synthesis, modification: | | | | | |
| | | | Ribosomal proteins | | | | | |
| | | Backbone | RpsU/30S ribosomal | Cytoplasm | 1 | 14% | — | — |
| | | | subunit protein S21; | | | | | |
| | | | structural component; | | | | | |
| | | | Macromolecule | | | | | |
| | | | synthesis, modification: | | | | | |
| | | | Ribosomal proteins | | | | | |
| | | Backbone | RpsC/30S ribosomal | Cytoplasm | 7 | 45% | — | — |
| | | | subunit protein S3; | | | | | |
| | | | structural component; | | | | | |
| | | | Macromolecule | | | | | |
| | | | synthesis, modification: | | | | | |
| | | | Ribosomal proteins | | | | | |
| | | Backbone | RpsD/30S ribosomal | Cytoplasm | 6 | 24% | — | — |
| | | | subunit protein S4; | | | | | |
| | | | structural component; | | | | | |
| | | | Macromolecule | | | | | |
| | | | synthesis, modification: | | | | | |
| | | | Ribosomal proteins | | | | | |
| | | Backbone | RpsL/30S ribosomal | Cytoplasm | 3 | 17% | — | — |
| | | | subunit protein S12; | | | | | |
| | | | structural component; | | | | | |
| | | | Macromolecule | | | | | |
| | | | synthesis, modification: | | | | | |
| | | | Ribosomal proteins | | | | | |
| 323 | 324 | Backbone | SodB/superoxide | Cytoplasm | 1 | 13% | — | — |
| | | | dismutase, iron; enzyme; | | | | | |
| | | | Protection responses: | | | | | |
| | | | Detoxification | | | | | |
| 325 | 326 | Backbone | SucD/succinyl-CoA | Cytoplasm | 2 | 8% | — | — |
| | | | synthetase, alpha subunit; | | | | | |
| | | | enzyme; Energy | | | | | |
| | | | metabolism, carbon: | | | | | |
| | | | TCA cycle | | | | | |
| 327 | 328 | Backbone | TalB/transaldolase B; | Cytoplasm | 6 | 19% | — | — |
| | | | enzyme; Central | | | | | |
| | | | intermediary metabolism: | | | | | |
| | | | Non-oxidative branch, | | | | | |
| | | | pentose pathway | | | | | |
| | | Backbone | Tig/trigger factor; a | Cytoplasm | 5 | 13% | — | — |
| | | | molecular chaperone | | | | | |
| | | | involved in cell division; | | | | | |
| | | | factor; Cell division | | | | | |
| 329 | 330 | Backbone | Z0751/hypothetical | Cytoplasm | 4 | 32% | — | — |
| | | | protein/unknown | | | | | |
| | | | function | | | | | |
| 331 | 332 | Backbone | WrbA/trp repressor | Cytoplasm | 1 | 10% | — | — |
| | | | binding protein; affects | | | | | |
| | | | association of trp | | | | | |
| | | | repressor and operator; | | | | | |
| | | | regulator; Amino acid | | | | | |
| | | | biosynthesis: Tryptophan | | | | | |
| 333 | 334 | Backbone | YaiE/hypothetical | Cytoplasm | 2 | 14% | — | — |
| | | | protein/unknown | | | | | |
| | | | function | | | | | |
| 335 | 336 | Backbone | YbaA/hypothetical | Cytoplasm | 1 | 15% | — | — |
| | | | protein/unknown | | | | | |
| | | | function | | | | | |
| 337 | 338 | Backbone | YdfH/hypothetical | Cytoplasm | 1 | 7% | — | — |
| | | | protein/unknown | | | | | |
| | | | function | | | | | |
| 339 | 340 | Backbone | YjbJ/hypothetical | Cytoplasm | 4 | 46% | — | — |
| | | | protein/unknown | | | | | |
| | | | function | | | | | |

¹Based on homology to the sequenced, E. coli O157 strain EDL933 genome, and plasmid, pO157.
²Putative functions assigned to hypothetical proteins using the Conserved Domain Database (CDD).
³Bacterial cell localization of proteins determined by PSORTb v.2.0/PSLpred/PSORTdb, and SignalP 3.0 prediction program.
⁴STM, signature tagged mutagenesis¹⁷; IVIAT, in vivo induced antigen technology¹¹.

[0189] All publications and patents mentioned in this specification are herein incorporated by reference to the same extent as if each individual publication or patent was specifically and individually indicated to be incorporated by reference.

What is claimed is:

1. A composition for stimulating an immune response against E. coli O157, said composition comprising substantially pure OsmY (SEQ ID NO: 109) or an immunogenic fragment thereof.

2. The composition of claim 1, said composition further comprising a pharmaceutically acceptable carrier or an adjuvant.

3. A method of inducing an immune response to E. Coli O157 in a mammal, the method comprising administering to the mammal the composition of claim 1.

4. A method of treating a mammal for an E. Coli O157 associated disease, said method comprising administering the composition of claim 1.

5. The method of claim 4, wherein said treatment is a prophylactic.

6. The method of claim 4, wherein said treatment is therapeutic.

7. The method of claim 3 or 4, wherein said mammal is a cattle or human.

8. A method for producing an antibody specific to OsmY (SEQ ID NO: 109); said method comprising the steps of
a) immunizing a mammal with said peptide or an immunogenic fragment thereof, and
b) purifying said antibody from the tissue of said mammal, or from a hybridoma made using said tissue.

9. The method of claim 8 wherein said antibody is a polyclonal antibody or fragment thereof.

10. The method of claim 8 wherein said antibody is a monoclonal antibody or fragment thereof.

11. A composition for stimulating an immune response against E. coli O157, said composition comprising substantially pure YleB (SEQ ID NO: 43) or an immunogenic fragment thereof.

12. The composition of claim 11, said composition further comprising a pharmaceutically acceptable carrier or an adjuvant.

13. A method of inducing an immune response to E. Coli O157 in a mammal, the method comprising administering to the mammal the composition of claim 11.

14. A method of treating a mammal for an E. Coli O157 associated disease, said method comprising administering the composition of claim 11.

15. The method of claim 14, wherein said treatment is a prophylactic.

16. The method of claim 14, wherein said treatment is therapeutic.

17. The method of claim 13 or 14, wherein said mammal is a cattle or human.

18. A method for producing an antibody specific to YleB (SEQ ID NO: 43); said method comprising the steps of
a) immunizing a mammal with said peptide or an immunogenic fragment thereof, and
b) purifying said antibody from the tissue of said mammal, or from a hybridoma made using said tissue.

19. The method of claim 18 wherein said antibody is a polyclonal antibody or fragment thereof.

20. The method of claim 18 wherein said antibody is a monoclonal antibody or fragment thereof.

21. A composition for stimulating an immune response against E. coli O157, said composition comprising substantially pure KefC (SEQ ID NO: 91) or an immunogenic fragment thereof.

22. The composition of claim 21, said composition further comprising a pharmaceutically acceptable carrier or an adjuvant.

23. A method of inducing an immune response to E. Coli O157 in a mammal, the method comprising administering to the mammal the composition of claim 21.

24. A method of treating a mammal for an E. Coli O157 associated disease, said method comprising administering the composition of claim 21.

25. The method of claim 24, wherein said treatment is a prophylactic.

26. The method of claim 24, wherein said treatment is therapeutic.

27. The method of claim 23 or 24, wherein said mammal is a cattle or human.

28. A method for producing an antibody specific to KefC (SEQ ID NO: 91); said method comprising the steps of
a) immunizing a mammal with said peptide or an immunogenic fragment thereof, and
b) purifying said antibody from the tissue of said mammal, or from a hybridoma made using said tissue.

29. The method of claim 28 wherein said antibody is a polyclonal antibody or fragment thereof.

30. The method of claim 28 wherein said antibody is a monoclonal antibody or fragment thereof.

31. A composition for stimulating an immune response against E. coli O157, said composition comprising substantially pure MopB (SEQ ID NO: 251) or an immunogenic fragment thereof.

32. The composition of claim 31, said composition further comprising a pharmaceutically acceptable carrier or an adjuvant.

33. A method of inducing an immune response to E. Coli O157 in a mammal, the method comprising administering to the mammal the composition of claim 31.

34. A method of treating a mammal for an E. Coli O157 associated disease, said method comprising administering the composition of claim 31.

35. The method of claim 34, wherein said treatment is a prophylactic.

36. The method of claim 34, wherein said treatment is therapeutic.

37. The method of claim 33 or 34, wherein said mammal is a cattle or human.

38. A method for producing an antibody specific to MopB (SEQ ID NO: 251); said method comprising the steps of
a) immunizing a mammal with said peptide or an immunogenic fragment thereof, and
b) purifying said antibody from the tissue of said mammal, or from a hybridoma made using said tissue.

39. The method of claim 38 wherein said antibody is a polyclonal antibody or fragment thereof.

40. The method of claim 38 wherein said antibody is a monoclonal antibody or fragment thereof.

41. A composition for stimulating an immune response against E. coli O157, said composition comprising substantially pure CysN (SEQ ID NO: 283) or an immunogenic fragment thereof.

42. The composition of claim 41, said composition further comprising a pharmaceutically acceptable carrier or an adjuvant.

43. A method of inducing an immune response to E. Coli O157 in a mammal, the method comprising administering to the mammal the composition of claim 41.

44. A method of treating a mammal for an E. Coli O157 associated disease, said method comprising administering the composition of claim 41.

45. The method of claim 44, wherein said treatment is a prophylactic.

46. The method of claim 44, wherein said treatment is therapeutic.

47. The method of claim 43 or 44, wherein said mammal is a cattle or human.

48. A method for producing an antibody specific to CysN (SEQ ID NO: 283); said method comprising the steps of
a) immunizing a mammal with said peptide or an immunogenic fragment thereof, and
b) purifying said antibody from the tissue of said mammal, or from a hybridoma made using said tissue.

49. The method of claim 48 wherein said antibody is a polyclonal antibody or fragment thereof.

50. The method of claim 48 wherein said antibody is a monoclonal antibody or fragment thereof.

51. A composition for stimulating an immune response against E. coli O157, said composition comprising substantially pure FolE (SEQ ID NO: 285) or an immunogenic fragment thereof.

52. The composition of claim 51, said composition further comprising a pharmaceutically acceptable carrier or an adjuvant.

53. A method of inducing an immune response to E. Coli O157 in a mammal, the method comprising administering to the mammal the composition of claim 51.

54. A method of treating a mammal for an E. Coli O157 associated disease, said method comprising administering the composition of claim 51.

55. The method of claim 54, wherein said treatment is a prophylactic.

56. The method of claim 54, wherein said treatment is therapeutic.

57. The method of claim 53 or 54, wherein said mammal is a cattle or human.

58. A method for producing an antibody specific to FolE (SEQ ID NO: 285); said method comprising the steps of
a) immunizing a mammal with said peptide or an immunogenic fragment thereof, and
b) purifying said antibody from the tissue of said mammal, or from a hybridoma made using said tissue.

59. The method of claim 58 wherein said antibody is a polyclonal antibody or fragment thereof.

60. The method of claim 58 wherein said antibody is a monoclonal antibody or fragment thereof.

61. A composition for stimulating an immune response against E. coli O157, said composition comprising substantially pure CirA (SEQ ID NO: 113) or an immunogenic fragment thereof.

62. The composition of claim 61, said composition further comprising a pharmaceutically acceptable carrier or an adjuvant.

63. A method of inducing an immune response to E. Coli O157 in a mammal, the method comprising administering to the mammal the composition of claim 61.

64. A method of treating a mammal for an E. Coli O157 associated disease, said method comprising administering the composition of claim 61.

65. The method of claim 64, wherein said treatment is a prophylactic.

66. The method of claim 64, wherein said treatment is therapeutic.

67. The method of claim 63 or 64, wherein said mammal is a cattle or human.

68. A method for producing an antibody specific to CirA (SEQ ID NO: 113); said method comprising the steps of
a) immunizing a mammal with said peptide or an immunogenic fragment thereof, and
b) purifying said antibody from the tissue of said mammal, or from a hybridoma made using said tissue.

69. The method of claim 68 wherein said antibody is a polyclonal antibody or fragment thereof.

70. The method of claim 68 wherein said antibody is a monoclonal antibody or fragment thereof.

71. A composition for stimulating an immune response against E. coli O157, said composition comprising substantially pure YeaF (SEQ ID NO: 175) or an immunogenic fragment thereof.

72. The composition of claim 71, said composition further comprising a pharmaceutically acceptable carrier or an adjuvant.

73. A method of inducing an immune response to E. Coli O157 in a mammal, the method comprising administering to the mammal the composition of claim 71.

74. A method of treating a mammal for an E. Coli O157 associated disease, said method comprising administering the composition of claim 71.

75. The method of claim 74, wherein said treatment is a prophylactic.

76. The method of claim 74, wherein said treatment is therapeutic.

77. The method of claim 73 or 74, wherein said mammal is a cattle or human.

78. A method for producing an antibody specific to YeaF (SEQ ID NO: 175); said method comprising the steps of
a) immunizing a mammal with said peptide or an immunogenic fragment thereof, and
b) purifying said antibody from the tissue of said mammal, or from a hybridoma made using said tissue.

79. The method of claim 78 wherein said antibody is a polyclonal antibody or fragment thereof.

80. The method of claim 78 wherein said antibody is a monoclonal antibody or fragment thereof.

81. A composition for stimulating an immune response against E. coli O157, said composition comprising substantially pure Z1931 (SEQ ID NO: 169) or an immunogenic fragment thereof.

82. The composition of claim 81, said composition further comprising a pharmaceutically acceptable carrier or an adjuvant.

83. A method of inducing an immune response to E. Coli O157 in a mammal, the method comprising administering to the mammal the composition of claim 81.

84. A method of treating a mammal for an E. Coli O157 associated disease, said method comprising administering the composition of claim 81.

85. The method of claim 84, wherein said treatment is a prophylactic.

86. The method of claim 84, wherein said treatment is therapeutic.

87. The method of claim 83 or 84, wherein said mammal is a cattle or human.

88. A method for producing an antibody specific to Z1931 (SEQ ID NO: 169); said method comprising the steps of
a) immunizing a mammal with said peptide or an immunogenic fragment thereof, and
b) purifying said antibody from the tissue of said mammal, or from a hybridoma made using said tissue.

89. The method of claim 88 wherein said antibody is a polyclonal antibody or fragment thereof.

90. The method of claim 88 wherein said antibody is a monoclonal antibody or fragment thereof.

91. A composition for stimulating an immune response against E. coli O157, said composition comprising substantially pure Z0269 (SEQ ID NO: 195) or an immunogenic fragment thereof.

92. The composition of claim 91, said composition further comprising a pharmaceutically acceptable carrier or an adjuvant.

93. A method of inducing an immune response to E. Coli O157 in a mammal, the method comprising administering to the mammal the composition of claim 91.

94. A method of treating a mammal for an E. Coli O157 associated disease, said method comprising administering the composition of claim 91.

95. The method of claim 94, wherein said treatment is a prophylactic.

96. The method of claim 94, wherein said treatment is therapeutic.

97. The method of claim 93 or 94, wherein said mammal is a cattle or human.

98. A method for producing an antibody specific to Z0269 (SEQ ID NO: 195); said method comprising the steps of
a) immunizing a mammal with said peptide or an immunogenic fragment thereof, and
b) purifying said antibody from the tissue of said mammal, or from a hybridoma made using said tissue.

99. The method of claim 98 wherein said antibody is a polyclonal antibody or fragment thereof.

100. The method of claim 98 wherein said antibody is a monoclonal antibody or fragment thereof.

101. A method of identifying a protein comprising the steps of:
(a) providing polyclonal antibodies, wherein said polyclonal antibodies are isolated from the sera of a subject infected with a pathogen,
(b) contacting said sera with a library of recombinant proteins under conditions allowing for complex formation between said polyclonal antibodies and said proteins, wherein said library is derived from said pathogen,
(c) identifying those proteins in said complex with said antibodies.

102. The method of claim 101, wherein said pathogen is E. coli O157.

103. The method of claim 101, wherein said polyclonal antibodies are coupled to a column.

104. The method of claim 101, wherein said proteins identified in step (c) are identified using GelC-MS/MS.

105. An isolated polypeptide selected from the group consisting of: (a) a polypeptide comprising an amino acid sequence having substantial identity to any one of the polypeptides identified in Table 2, Table 3, or Table 7; (b) a polypeptide comprising the amino acid sequence of any one of the polypeptides identified in Table 2, Table 3 or Table 7; (c) a polypeptide that consists essentially of any one of the polypeptides identified in Table 2, Table 3 or Table 7; and (d) a polypeptide comprising at least 200 contiguous amino acids of any one of the polypeptides identified in Table 2, Table 3 or Table 7.

106. An isolated nucleic acid molecule selected from the group consisting of: (a) a nucleic acid molecule having substantial identity to any one of the polynucleotides identified in Table 2 or Table 3; (b) a nucleic acid molecule comprising the nucleotide sequence of any one of the polynucleotides identified in Table 2 or Table 3 or a complement thereof; (c) a nucleic acid molecule consisting essentially of any one of the polynucleotides identified in Table 2 or Table 3 or a fragment thereof; and (d) a nucleic acid molecule comprising at least 20 contiguous nucleotides of any one of the polynucleotides identified in Table 2, Table 3 or Table 7

107. A vector or host cell comprising the isolated nucleic acid molecule of claim 106.

108. A method for screening a compound for effectiveness as an antagonist of a polypeptide of claim 1, the method comprising the steps of: a) exposing a sample comprising a polypeptide of claim 1 to a compound; and b) detecting antagonist activity in the sample, wherein said antagonist activity identifies said compound as an effective antagonist of a polypeptide of claim 105.

109. A composition comprising an antagonist compound identified by a method of claim 108.

110. A method for screening an antagonist compound for effectiveness in altering expression of a target nucleic acid molecule of claim 2, said method comprising the steps of: a) exposing a sample comprising a target nucleic acid molecule of claim 2 to a compound under conditions suitable for the expression of the target nucleic acid molecule; b) detecting altered expression of the target nucleic acid molecule; and c) comparing the expression of the target nucleic acid molecule in the presence of the compound and in the absence of the compound, wherein a decrease in expression identifies an antagonist compound effective in altering the expression of the target nucleic acid molecule of claim 106.

111. A composition comprising an antagonist compound identified according to the method of claim 110.

112. A method for the treatment of a subject having need to inhibit a polypeptide of claim 105, said method comprising administering to the individual a therapeutically effective amount of the antagonist of claim 5 or claim 7.

113. A vaccine composition comprising a pharmaceutically acceptable vehicle and an isolated immunogenic polypeptide of claim 105.

114. A method of preventing or treating a microbial infection in a mammal by administering to said mammal a vaccine composition of claim 113.

115. The method of claim 114, wherein said mammal is a human.

The application's sequence listing, which the Patent Office published only in electronic form, follows.

SEQUENCE LISTING (340 sequences)

SEQ ID NO: 1 - protein, 303 aa, Escherichia coli
MKITVLGCGALGQLWLTALCKQGHEVQGWLRVPQPYCSVNLVETDGSIFNESLTANDPDFLATSDLLLVTLKAWQVSDAVKSLASTLPVTTPILLIHNGMGTIEELQNIQQPLLMGTTTHAACRDGNVIIHVANGITHIGPARQQDGDYSYLADILQTVLPDVAWHNNIRAELWRKLAVNCVINPLTAIWNCPNGELRHHPQEIMQICEEVAAVIEREGHHTSAEDLRDYVMQVIDATAENISSMLQDIRTLRHTEIDYINGFLLRRARAHGIAVPENTRLFEMVKRKESEYERIGTGLPRPW

SEQ ID NO: 2 - DNA, 912 bp, Escherichia coli
atgaaaattaccgtattgggatgcggtgccttagggcaattatggcttacagcactttgtaaacagggtcacgaagttcagggctggctgcgcgtaccgcaaccttattgtagtgtgaatctggttgagactgatggttcgatatttaacgaatcgctgaccgccaacgatcccgattttcttgccaccagcgatctgctcctggtgacgctgaaagcatggcaggtttccgatgccgtcaaaagcctcgcgtccacactgcctgtaactacgccaatactgttaattcacaacggcatgggcaccatcgaagaattgcaaaacattcagcagccattactgatgggcaccaccacccatgccgcctgccgcgacggcaatgtcattattcatgtggcaaacggtatcacgcatattggtccagcacggcaacaggacggcgattacagttatctggcggatatattgcaaaccgtgttgcctgacgttgcctggcataacaatattcgcgccgagctgtggcgcaagctggcagtcaactgtgtgattaatccactgactgccatctggaattgcccgaacggtgaattacgtcatcatccgcaagaaattatgcaaatatgcgaagaagtcgcggcagtgatcgaacgcgaagggcatcatacttcagcggaagatttacgtgattacgtgatgcaggtgattgatgccacagcggaaaatatctcgtcgatgttgcaggatatccgcacgctgcgccacaccgaaatcgactatatcaatggttttctcttacgccgcgcccgcgcgcatgggattgccgtaccggaaaacacccgcctgtttgaaatggtaaaaagaaaggagagtgaatatgagcgcatcggcactggtttgcctcgcccctggtag

SEQ ID NO: 3 - protein, 430 aa, Escherichia coli
MKARQQKYCDKIANFWCHPTGKIIMSLAGKKIVLGVSGGIAAYKTPELVRRLRDRGADVRVAMTEAAKAFITPLSLQAVSGYPVSDSLLDPAAEAAMGHIELGKWADLVILAPATADLIARVAAGMANDLVSTICLATPAPVAVLPAMNQQMYRAAATQHNLEVLASRGLLIWGPDSGSQACGDIGPGRMLDPLTIVDMAVAHFSPVNDLKHLNIMITAGPTREPLDPVRYISNHSSGKMGFAIAAAAARRGANVTLVSGPVSLPTPPFVKRVDVMTALEMEAAVNASVQQQNIFIGCAAVADYRAATVAPEKIKKQATQGDELTIKMVKNPDIVAGVAALKDHRPYVVGFAAETNNVEEYARQKRIRKNLDLICANDVSQPTQGFNSDNNALHLFWQDGDKVLPLERKELLGQLLLDEIVTRYDEKNRR

SEQ ID NO: 4 - DNA, 1293 bp, Escherichia coli
gtgaaggcacgacaacaaaagtattgtgataaaatcgccaacttctggtgtcacccaacaggaaaaatcatcatgagcctggccggtaaaaaaatcgttctcggcgttagcggcggtattgctgcctataaaacccctgaactggtgcgtcgtttgcgcgatcgcggggccgacgtccgcgtagccatgaccgaagcggcaaaagcctttatcaccccacttagcttgcaggcggtttctggttatcccgtttccgacagtttgctggacccggcagccgaagccgctatgggccatattgagctgggtaaatgggctgatttagtgattctcgcccctgccacggcagatttgattgcccgtgttgctgccggaatggcgaatgacctggtatcgacgatttgtctggctacacctgcgcctgtagccgtgctccccgccatgaaccagcagatgtaccgtgccgctgccacgcagcataatttagaggtgcttgcttcccgtggtttgctcatctgggggccagacagtggcagtcaggcttgtggtgatatcggtcctgggcgaatgctcgatccgttaaccattgtggatatggcggtagcgcatttttcgcccgtcaacgacctgaaacatctgaacattatgattaccgccggcccgacgcgtgaaccgctcgatcccgtgcgttatatctctaatcacagctccggcaagatgggttttgctatcgccgccgccgctgcccgtcgtggcgcgaacgtcacgctggtatcaggtccggtttcactaccgacgccaccgtttgttaaacgtgttgatgtgatgaccgcgctggaaatggaagccgccgtgaatgcttctgtacagcagcaaaatatttttatcggctgcgccgccgtggcggattatcgcgcagctaccgtggccccagagaaaatcaaaaagcaggccacgcagggtgatgaattaacaataaaaatggttaaaaaccccgatatcgtcgcaggcgttgccgcactaaaagaccatcgaccctacgtcgttggatttgccgccgaaacaaataatgtggaagaatacgcccggcaaaaacgtatccgtaaaaaccttgatctgatctgcgcgaacgatgtttcccagccaactcaaggatttaacagcgacaacaacgcattacaccttttctggcaggacggagataaagtcttaccgcttgagcgcaaagagctccttggccaattattactcgacgagatcgtgacccgttatgatgaaaaaaatcgacgttaa

SEQ ID NO: 5 - protein, 581 aa, Escherichia coli
MIKPTFLRRVAIAALFTGSCFSTVAAPPAPSPVSYGVEEDVFHPVRAKQGMVASVDATATQVGVDILKEGGNAVDAAVAVGYALAVTHPQAGNLGGGGFMLIRSKNGNTTAIDFREMAPAKATRDMFLDDQGNPDSKKSLTSHLASGTPGTVAGFSLALDKYGTMPLNKVVQPAFKLARDGFIVNDELADDLKTYGSEVLPNHENSKAIFWKEGEPLKKGDKLVQANLAKSLEMIAENGPDEFYKGTIAEQIAQEMQKNGGLITKEDLAAYKAVERTPISGDYRGYQVYSMPPPSSGGIHIVQILNILENFDMKKYGFGSADAMQIMAEAEKYAYADRSEYLGDPDFVKVPWQALTNKAYAKSIAEQIDINKAKPSSEIRPGKLAPYESNQTTHYSVVDKDGNAVAVTYTLNTTFGTGIVAGESGILLNNQMDDFSAKPGVPNVYGLVGGDANAVGPNKRPLSSMSPTIVVKDGKTWLVTGSPGGSLIITTVLQMVVNSIDYGMNVAEATNAPRFHHQWLPDELRVEKGFSPDTLKLLEAKGQKVALKEAMGSTQSIMVGPDGELYGASDPRSVDDLTAGY

SEQ ID NO: 6 - DNA, 1746 bp, Escherichia coli
atgataaaaccgacgtttttacgccgggtggccattgctgctctgttcacaggaagttgttttagtacggtagccgcgccacctgcgccgtctcctgtttcttacggcgtggaggaagatgtctttcatccggtacgcgcgaaacaggggatggtggcatctgtagatgctactgccactcaggtgggggtggatatcctcaaggagggcgggaatgccgttgatgccgccgtggctgtgggctacgcgctggcggtaacgcatccgcaggcagggaatctgggcggtggtggttttatgctgatccgctcgaaaaatggcaataccaccgctatcgatttccgcgaaatggcacccgccaaagcgacccgcgatatgttccttgatgaccagggcaacccggacagcaaaaaatcactcacttcgcatctggcttccggcacgcccggtacggtcgctggtttctcgctggcgttggataaatacggcacaatgccgttgaacaaagtggtgcagccagcgtttaaactggcacgcgatggttttatcgttaacgacgagctggctgacgatctcaaaacctacgggagcgaagtgctgccgaatcacgaaaacagcaaggctatcttctggaaagagggcgagccgctgaaaaagggcgacaagctggtgcaggcgaacctggcaaagagcctggagatgattgccgaaaacggcccggacgaattctacaaaggcacgatagcggaacagattgcccaggagatgcagaaaaacggtggcctgatcactaaagaagatttagcggcgtataaagcggtcgaacgcacaccgataagcggcgattatcgcgggtatcaggtttactccatgccaccgccatcctccggcgggatccatatcgtacaaatcctcaatattctggaaaacttcgatatgaagaaatacggttttggcagcgccgacgcgatgcagatcatggcagaagcggagaaatatgcctacgctgaccgctcggaatatcttggcgacccggattttgtgaaagtcccgtggcaggcgctgaccaataaagcctatgccaaatctattgccgagcaaatcgatatcaataaagcgaaaccgtccagcgagattcgccccggcaagcttgcgccttatgagagtaatcaaactacccattattcggtggtggataaagacggtaacgcggtggcggtgacctatacgctgaacaccaccttcggtacgggtattgtcgcgggcgagagcggtattttgctcaataaccaaatggatgatttctctgccaaaccgggcgtaccgaacgtttacgggctggtgggcggtgatgccaacgccgtcgggccgaacaaacgcccgctgtcatcgatgtcaccaaccattgtggtgaaagacggtaaaacctggctggtcaccggtagccctggcgggagcctgatcatcactacagtgcttcaaatggtggtgaatagcatcgattatggcatgaacgtcgccgaagcgaccaatgcgccgcgtttccaccatcagtggttgccggacgagctgcgtgtcgaaaaagggtttagcccggatacgctcaagctgctggaagcaaaaggtcagaaagtggcgctgaaagaggcgatgggcagtacacaaagcattatggttgggccggacggtgagttgtacggcgcatccgacccgcgctcggtggatgatttaacggcggggtactaa

SEQ ID NO: 7 - protein, 440 aa, Escherichia coli
MSGFSMKRVSQMTALAMALGLACASSWAAELAKPLTLDQLQQQNGKAIDTRSSAFYNGWPQTLNGPSGHEPAALNLSASWLDKMSTEQLNAWIKQHNLKADAPVALYGNGKDVDAVKTRLQKAGFTHISILSDALSEPSRLQKLPHFEQLVYPQWLHDLQQGKEVTAKPAGDWKVIEAARGAPKLYLISHIPGADYIDTNEVESEPLWNKVSDEQLKAMLAKHGIRHDTTVILYGRDVYAAARVAQIMLYAGVKDVRLLDGGWQTWSDAGLPVERGTPPKVKAEPDFGVKIPAQPQLMLDMEQARGLLHRQDASLVSIRSWPEFIGTTSGYSYIKPKGEIAGARWGHAGSDSTHMEDFHNPDGTMRSADDITAMWKAWNIKPDQQVSFYCGTGWRASETFMYARAMGWNNVSVYDGGWYEWSSDPKNPVATGERGPDSSK

SEQ ID NO: 8 - DNA, 1323 bp, Escherichia coli
atgtcgggattttcgatgaaacgtgtttctcaaatgaccgcgctggcaatggctttagggctggcttgcgcttcttcgtgggccgctgaactggcgaagcctcttacacttgaccagcttcaacaacaaaatggcaaagcgatagatactcgctccagcgcgttttataacggctggccacaaaccttaaatggcccttctggtcatgaacctgccgccttaaacctctctgctagctggcttgacaaaatgagcaccgaacagctcaacgcgtggatcaagcaacataacctgaaagccgatgccccggtggcgctgtacggtaatggcaaagatgtcgacgccgtcaaaacgcgactgcaaaaagcaggttttacgcatatctccattctgagtgacgcgctaagcgaaccttcccgtctacaaaaactgccgcactttgagcagctggtttatccgcaatggctgcacgacctgcaacaaggtaaagaggttacggcgaaacctgccggtgactggaaagtcattgaagcggccaggggcgctcctaagctttaccttatcagccatattcccggtgctgactacatcgataccaacgaagtggaaagcgaaccgctgtggaacaaagtttctgatgaacaactaaaagcgatgctggcaaaacacggcattcgccatgacaccacggtcattctgtacgggcgtgacgtatacgctgcagcgcgtgtggcgcagattatgctttatgccggcgtgaaagatgtgcgcctgctggatggcggctggcaaacctggtccgacgcgggtctgcccgttgagcgcggtacgccaccgaaagtgaaagcggaaccggatttcggcgtgaagatcccggcacaaccgcagttgatgctcgatatggaacaggcccgtggactgctgcatcgccaggatgcatcgctggtgagcattcgttcgtggccagaatttatcggtacgaccagcggttacagctatattaaaccaaaaggtgaaatagccggagcacgttggggacacgctggtagcgactcgacgcatatggaagatttccataatccggatggcaccatgcgtagcgccgatgatattaccgctatgtggaaagcatggaatatcaaaccagatcagcaagtttcattctactgcggcaccggctggcgcgcgtccgaaacctttatgtacgcacgagcaatgggctggaataacgtctccgtttacgacggcggctggtacgaatggagcagcgatccaaaaaatccggtagcaaccggtgaacgcggcccggacagcagcaaataa

SEQ ID NO: 9 - protein, 406 aa, Escherichia coli
MSQPITRENFDEWMIPVYAPAPFIPVRGEGSRLWDQQGKEYIDFAGGIAVNALGHAHPELREALNEQASKFWHTGNGYTNESVLRLAKKLIDATFADRVFFCNSGAEANEAALKLARKFAHDRYGSHKSGIVAFKNAFHGRTLFTVSAGGQPAYSQDFAPLPPDIRHAAYNDINSASALIDDSTCAVIVEPIQGEGGVVPASNAFLQGLRELCDRHNALLIFDEVQTGVGRTGELYAYMHYGVTPDLLTTAKALGGGFPVGALLATEECASVMTVGTHGTTYGGNPLASAVAGKVLELINTPEMLNGVKQRHDWFVERLNIINHRYGLFNEVRGLGLLIGCVLNADYAGQAKQISQEAAKAGVMVLIAGGNVVRFAPALNVSEEEVTTGLDRFAVACEHFVSRGSS

SEQ ID NO: 10 - DNA, 1221 bp, Escherichia coli
atgtctcagccaattacgcgtgaaaactttgatgaatggatgatacctgtttacgctccggcaccgtttataccggtacgtggcgaaggttcgcgcttgtgggatcagcaggggaaagagtatatcgacttcgcgggtggcattgcggtgaacgcgctgggccatgcgcatccggaactgcgtgaggcgctgaacgaacaggcgagtaagttctggcataccggcaacggttacaccaacgagtcggtactgcgactggcgaaaaaattgatcgacgccacgtttgccgatcgcgttttcttttgtaactccggtgcggaagccaacgaagcggcgctaaaactggcgcgtaaattcgctcacgaccgctacggcagccataagagcggtatcgtggcgtttaaaaatgcgtttcatggtcgcacgctgtttactgttagtgcgggtgggcagccagcctattcacaggattttgcgccactgccaccagatatccgtcatgctgcatataacgatattaactctgccagcgcgctgattgacgactctacctgtgcggtgattgtcgaacccatccagggtgaaggcggtgtggtgccagccagcaacgcatttttacaaggtctgcgtgaattgtgtgatcgccacaatgcgctgttgatttttgatgaagtacaaaccggcgtcgggcgtaccggggaactgtatgcctatatgcactacggcgtgacgcctgatctgttaactaccgccaaagctctgggcggcggtttcccggtcggtgcgttgttagcaaccgaagagtgcgccagcgtgatgaccgttggcactcatggcaccacctatggcggcaatccgctggcctcggcggtggcaggcaaagtgctggagctcatcaatacgccagagatgcttaacggggttaagcaacgtcacgactggtttgttgagcgtcttaatattattaatcaccgctatggtttgttcaatgaagttcgcggcttaggtttgctgattggctgtgtactgaatgccgattacgccgggcaagcgaaacagatctctcaggaagcggcgaaagcaggcgtgatggtactgattgcgggtggcaacgtggtgcgttttgcgcctgcgctcaatgtcagcgaagaagaggtgacgaccggactggatcgctttgcagttgcttgcgaacactttgttagccgaggttcatcatga

SEQ ID NO: 11 - protein, 367 aa, Escherichia coli
MSDSQTLVVKLGTSVLTGGSRRLNRAHIVELVRQCAQLHAAGHRIVIVTSGAIAAGREHLGYPELPATIASKQLLAAVGQSRLIQLWEQLFSIYGIHVGQMLLTRADMEDRERFLNARDTLRALLDNNIVPVINENDAVATAEIKVGDNDNLSALAAILAGADKLLLLTDQKGLYTADPRSNPQAELIKDVYGIDDALRAIAGDSVSGLGTGGMSTKLQAADVACRAGIDTIIAAGSKPGVIGDVMEGISVGTLFHAQATPLENRKRWIFGAPPAGEITVDEGATAAILERGSSLLPKGIKSVTGNFSRGEVIRICNLEGRDIAHGVSRYNSDALRRIAGHHSQEIDAILGYEYGPVAVHRDDMITR

SEQ ID NO: 12 - DNA, 1104 bp, Escherichia coli
atgagtgacagccagacgctggtggtaaaactcggcaccagtgtgctaacaggcggatcgcgccgcctgaaccgtgcccatatcgttgaacttgttcgccagtgcgcgcagttacatgccgccgggcatcggattgttattgtgacgtcgggcgcgatcgccgccggacgtgagcacctgggttacccggaactgccagcgactatcgcctcgaaacaactgctggcggcggtagggcagagtcgactgattcaactgtgggaacagctgttttcgatttatggcattcacgtcgggcaaatgctgctgactcgtgctgatatggaagaccgtgaacgcttcctgaacgcccgcgacaccctgcgtgcgttgctcgataacaatatcgttccggtaatcaatgagaacgatgctgtcgctacggcagagattaaagtcggcgataacgacaacctttctgcactggcggcgattctggcgggtgccgataaactgttgttactgaccgatcaaaaaggtttgtataccgctgacccgcgcagcaatccgcaggcagaactgattaaagatgtttacggcattgatgacgcactgcgcgcgattgctggtgacagcgtttcaggcctcggaactggcggcatgagtaccaaattgcaggccgctgacgtggcttgccgtgcgggtatcgacaccattattgccgcgggcagcaagccgggcgttattggtgatgtgatggaaggcatttccgtcggtacgctgttccatgcccaggcgactccgcttgaaaaccgtaaacgctggattttcggtgcgccgcctgcgggtgaaatcacggtagatgaaggggcaaccgccgccattcttgaacgcggcagctccctgttgccgaaaggcattaaaagcgtgactggcaacttctcgcgtggtgaagtcatccgcatttgtaacctcgaaggtcgcgatatcgcccacggcgtcagtcgttacaacagcgatgcattacgccgtattgccggacaccactcgcaagaaattgatgcaatactgggatatgaatacggcccggttgccgttcaccgtgatgacatgatcacccgttaa

SEQ ID NO: 13 - protein, 586 aa, Escherichia coli
MTITKLAWRDLVPDTDSYQEIFAQPHLIDENDPLFSDTQPRLQFALEQLLHTRASSSFMLAKAPEESEYLNLIANAARTLQSDAGQLVGGHYEVSGHSIRLRHAVSADDNFATLTQVVAADWVEAEQLFGCLRQFNGDITLQPGLVHQANGGILIISLRTLLAQPLLWMRLKNIVNRERFDWVAFDESRPLPVSVPSMPLKLKVILVGERESLADFQEMEPELSEQAIYSEFEDTLQIVDAESVTQWCRWVTFTARHNHLPAPGADAWPVLIREAARYTGEQETLPLSPQWILRQCKEVASLCDGDTFSGEQLNLMLQQREWREGFLAERMQDEILQEQILIETEGERIGQINALSVIEFPGHPRAFGEPSRISCVVHIGDGEFTDIERKAELGGNIHAKGMMIMQAFLMSELQLEQQIPFSASLTFEQSYSEVDGDSASMAELCALISALADVPVNQSIAITGSVDQFGRAQPVGGLNEKIEGFFAICQQRELTGKQGVIIPTANVRHLSLHSELVKAVEEGKFTIWAVDDVTDALPLLLNLVWDGEGQTTLMQTIQERIAQASQQEGRHRFPWPLRWLNWFIPN

SEQ ID NO: 14 - DNA, 1761 bp, Escherichia coli
ttgaccattacgaaacttgcatggcgtgacctggttcctgataccgatagctatcaggaaatatttgctcagccacatttgattgacgaaaacgatcctttattcagtgatactcaaccgcggctgcaatttgcgctggagcagttgctgcatacgcgagcatcctcctcttttatgctggcgaaggccccggaagagtctgagtatctgaatcttattgccaatgccgcgcgtacgctacaaagcgatgcaggccaactggtgggcggtcactatgaggtttccggccactccatccgcttacgtcacgcagtgagtgcagatgataattttgcgactttaacgcaagttgtcgctgccgactgggtagaagcggagcaactctttggctgcctgcgccagtttaatggcgacattaccctgcagcctggtctggtgcatcaggcaaatggcggtattctcatcatctctttgcgtacactgctggcgcaacctctgctgtggatgcggctgaaaaatatcgttaaccgcgagcgttttgactgggttgcgtttgatgagtcgcgccctctccccgtctctgtgccttcgatgccattgaagctgaaagtcattctggtaggcgaacgcgaatcattggctgatttccaggagatggagccagagctttcagagcaggctatttatagcgaatttgaagatactctgcagattgtcgatgcggagtcagtaacccagtggtgtcgctgggtgacatttaccgccagacataatcacttacctgccccgggagcggatgcctggccggtacttatccgcgaagcagcacgctacaccggtgaacaagaaacacttccgcttagcccgcagtggatcctccgccagtgtaaagaggtcgcctccctgtgtgatggcgacaccttctccggcgagcagctaaacttaatgctgcagcagcgtgaatggcgcgaaggtttcctcgctgaacgtatgcaggatgagatccttcaggagcaaatcctgattgaaaccgaaggcgaacgcatcgggcaaattaacgccctttcggtcattgaatttccgggtcatccacgcgcttttggcgaaccttctcgcattagctgcgttgtgcatattggcgatggtgaattcaccgacatcgaacgcaaagcggagcttggcggcaatatccatgcgaaagggatgatgatcatgcaagcgttcctgatgtcggaactacagcttgagcaacagatccccttctcagcatcgctgacatttgagcagtcatacagtgaagttgatggagatagtgcctcgatggctgaactctgcgccctgataagcgccctcgccgatgtgccggtgaatcagagtatcgctatcacaggttcagtcgatcagttcggtcgcgcccagccggtcggtggtttaaatgagaaaatcgaaggcttctttgctatttgccagcaacgtgagttaaccgggaaacaaggtgtcattatccccacagctaacgttcgccatttaagtcttcacagtgaactggtgaaagcggtagaagaaggcaaattcaccatctgggcagtagacgatgtgactgacgcactgccgttattattaaatctggtgtgggatggcgaaggccaaacgacgctgatgcaaaccatccaggaacgtatcgcgcaagcatcgcaacaggaaggacgtcaccgttttccatggccattacgttggctgaactggtttattccgaactga

SEQ ID NO: 15 - protein, 281 aa, Escherichia coli
MRGLFPISHPAIACSSIECYPYRLIFKGVIVAVHLLIVDALNLIRRIHAVQGSPCVETCQHALDQLIMHSQPTHAVAVFDDENRSSGWRHQRLPDYKAGRPPMPEELHDEMPALRAAFEQRGVPCWSTSGNEADDLAATLAVKVTQAGHQATIVSTDKGYCQLLSPTLRIRDYFQKRWLDAPFIDKEFGVQPQQLPDYWGLAGISSSKVPGVAGIGPKSATQLLVEFQSLEGIYENLDAVAEKWRKKLETHKEMAFLCRDIARLQTDLHIDGNLQQLRLVR

SEQ ID NO: 16 - DNA, 846 bp, Escherichia coli
ttgcgaggcctcttcccgatttctcatccagccatagcctgttccagtatcgaatgttacccttatcgcctgatctttaagggggttatcgtggctgttcatttgcttattgtcgatgcactgaatcttattcgtcgcattcatgccgttcaggggtcgccctgtgtcgaaacctgccagcatgcgctcgatcagctcattatgcacagccagccaacccacgcggtcgccgtttttgacgatgaaaaccgcagtagcggctggcgtcatcagcgtttaccagattacaaagcgggtcgaccgccaatgccggaagagttgcacgacgagatgcctgcattacgcgccgcctttgagcaacgcggcgtcccgtgctggtcaaccagcggcaacgaagccgatgacttagccgccacgctggcggtcaaagtgacacaggccgggcatcaggcaacgattgtttcgacagataaaggctactgtcagttactttcaccgacattacgtattcgtgattacttccagaaacgttggctggatgcgccatttatcgataaagaatttggcgttcaaccgcagcagttgcccgattactggggacttgcggggatcagcagttcaaaggtaccgggtgttgcgggaatcggaccaaaaagcgccacgcagctgctggtcgagtttcagagtctggaagggatatatgagaatctggatgcggttgccgaaaagtggcgcaaaaaattagaaacccataaagagatggcgtttctgtgccgcgatattgcccgcttacaaaccgatttgcatatcgacggcaatttacagcaattgcggttggtacggtaa

SEQ ID NO: 17 - protein, 235 aa, Escherichia coli
  misc_feature (107)..(107): Xaa can be any naturally occurring amino acid
MYRYLSIAAVVLSAAFSGPALAEGINSFSQAKAAAVKVHADAPGTFYCGCKINWQGKKGVVDLQSCGYQVRKNENRASRVEWEHVVPAWQFGHQRQCWQDGGRKNCXKDPVYRKMESDMHNLQPSVGEVNGDRGNFMYSQWNGGEGQYGQCAMKVDFKEKAAEPPARARGAIARTYFYMRDHYNLTLSRQQTQLFNAWDKMYPVTDWECERDERIAKVQGNHNPYVQRACQARKS

SEQ ID NO: 18 - DNA, 708 bp, Escherichia coli
atgtaccgttatttgtctattgctgcggtggtactgagcgcagcattttccggcccggcgttggccgaaggtatcaatagtttttctcaggcgaaagccgcggcggtaaaagtccacgctgacgcgcccggtacgttttattgcggatgtaaaattaactggcagggcaaaaaaggcgttgtcgatctgcaatcgtgcggctatcaggtgcgcaaaaatgaaaaccgcgccagccgcgtagagtgggaacacgtcgttcccgcctggcaattcggtcaccagcgccagtgctggcaggacggtggacgtaaaaattgcrccaaagatccggtctatcgcaagatggaaagcgatatgcataacctgcaaccgtcagtcggcgaggtgaatggcgatcgcggcaactttatgtacagccagtggaatggcggtgaaggccagtacggtcaatgcgccatgaaggtcgatttcaaagaaaaagctgccgaaccaccagcgcgtgcacgcggtgccattgcgcgcacctacttctatatgcgtgaccattacaacctgacactctctcgccagcaaacgcagctgttcaacgcatgggacaagatgtatccggttaccgactgggagtgcgagcgcgatgaacgcatcgcgaaggtacagggcaatcataacccgtatgtgcaacgcgcttgccaggcgcgaaagagctaa

SEQ ID NO: 19 - protein, 644 aa, Escherichia coli
MAKNLILWLVIAVVLMSVFQSFGPSESNGRKVDYSTFLQEVNNDQVREARINGREINVTKKDSNRYTTYIPVQDPKLLDNLLTKNVKVVGEPPEEPSLLASIFISWFPMLLLIGVWIFFMRQMQGGGGKGAMSFGKSKARMLTEDQIKTTFADVAGCDEAKEEVAELVEYLREPSRFQKLGGKIPKGVLMVGPPGTGKTLLAKAIAGEAKVPFFTISGSDFVEMFVGVGASRVRDMFEQAKKAAPCIIFIDEIDAVGRQRGAGLGGGHDEREQTLNQMLVEMDGFEGNEGIIVIAATNRPDVLDPALLRPGRFDRQVVVGLPDVRGREQILKVHMRRVPLAPDIDAAIIARGTPGFSGADLANLVNEAALFAARGNKRVVSMVEFEKAKDKIMMGAERRSMVMTEAQKESTAYHEAGHAIIGRLVPEHDPVHKVTIIPRGRALGVTFFLPEGDAISASRQKLESQISTLYGGRLAEEIIYGPEHVSTGASNDIKVATNLARNMVTQWGFSEKLGPLLYAEEEGEVFLGRSVAKAKHMSDETARIIDQEVKALIERNYNRARQLLTDNMDILHAMKDALMKYETIDAPQIDDLMARRDVRPPAGWEEPGASNNAGDNGSPKAPRPVDEPRTPNPGNTMSEQLGDK

SEQ ID NO: 20 - DNA, 1935 bp, Escherichia coli
atggcgaaaaacctaatactctggctggtcattgccgttgtgctgatgtcagtattccagagctttgggcccagcgagtctaatggccgtaaggtggattactctaccttcctacaagaggtcaataacgaccaggttcgtgaagcgcgtatcaacggacgtgaaatcaacgttaccaagaaagatagtaaccgttataccacttacattccggttcaggatccgaaattactggataacctgttgaccaagaacgtcaaggttgtcggtgaaccgcctgaagaacccagcctgctggcttctatcttcatctcctggttcccgatgctgttgctgattggtgtctggatcttcttcatgcgtcaaatgcagggcggcggtggcaaaggtgccatgtcgtttggtaagagtaaagcgcgcatgctgacggaagatcagatcaaaacgacctttgctgacgttgcgggctgcgacgaagcaaaagaagaagttgctgaactggttgagtatctgcgcgagccgagccgcttccagaaactcggcggtaagatcccgaaaggcgtcctgatggtcggtcctccgggtaccggtaaaacgctgctggcgaaagcgattgcaggcgaagcgaaagttccgttctttactatctccggttctgacttcgtagaaatgttcgtcggtgtgggtgcatcccgtgttcgtgacatgttcgaacaggcgaagaaagcggcaccgtgcatcatctttatcgatgaaatcgacgccgtaggccgccagcgtggcgcaggtctgggcggtggtcacgatgaacgtgaacagactctgaaccagatgctggttgagatggatggcttcgaaggtaacgaaggtatcatcgttatcgccgcgactaaccgtccggacgttctcgacccagcgctgctgcgtcctggccgtttcgaccgtcaggttgtggttggcttgccagatgttcgcggtcgtgagcagatcctgaaggttcacatgcgtcgcgtaccattggcacccgatatcgacgcggcaatcattgcccgtggtactcctggtttctccggtgctgacctggcgaacctggtgaacgaagcggcactgttcgctgctcgtggcaacaaacgcgttgtgtcgatggttgagttcgagaaagcgaaagacaaaatcatgatgggtgcggaacgtcgctccatggtgatgacggaagcgcagaaagaatcgacggcttaccacgaagcgggtcatgcgattatcggtcgcctggtgccggagcacgatccggtgcacaaagtgacgattatcccacgcggtcgtgcgctgggtgtgactttcttcttgcctgagggcgacgcaatcagcgccagccgtcagaaactggaaagccagatttctacgctgtacggtggtcgtctggcagaagagatcatctacgggccggaacatgtttctaccggtgcgtccaacgatattaaagttgcgaccaacctggcacgtaacatggtgactcagtggggcttctctgagaaattgggtccactgctgtacgcggaagaagaaggtgaagtgttcctcggccgtagcgtagcgaaagcgaaacatatgtccgatgaaactgcacgtatcatcgaccaggaagtgaaagcactgattgagcgtaactataatcgtgcgcgtcagcttctgaccgacaatatggatattctgcatgcgatgaaagatgctctcatgaaatatgagactatcgacgcaccgcagattgatgacctgatggcacgtcgcgatgtacgtccgccagcgggctgggaagaaccaggcgcttctaacaatgctggcgacaatggtagtccaaaggctcctcgtccggttgatgaaccgcgtacgccgaacccgggtaacaccatgtcagagcagttaggcgacaagtaa

SEQ ID NO: 21 - protein, 382 aa, Escherichia coli
  misc_feature (2)..(2): Xaa can be any naturally occurring amino acid
  misc_feature (9)..(9): Xaa can be any naturally occurring amino acid
MXLKEKTQXLFANAFGYPATHTIQAPGRVNLIGEHTDYNDGFVLPCAIDYQTVISCAPRDDRKVRVMAADYENQLDEFSLDAPIVAHENYQWANYVRGVVKHLQLRNNSFGGVDMVISGNVPQGAGLSSSASLEVAVGTVLQQLYHLPLDGAQIALNGQEAENQFVGCNCGIMDQLISALGKKDHALLIDCRSLGTKAVSMPKGVAVVIINSNFKRTLVGSEYNTRREQCETGARFFQQPALRDVTIEEFNAVAHELDPIVAKRVRHILTENARTVEAASALEQGDLKRMGELMAESHASMRDDFEITVPQIDTLVEIVKAVIGDKGGVRMTGGGFGGCIVALIPEELVPAVQQAVAEQYEAKTGIKETFYVCKPSQGAGQC

SEQ ID NO: 22 - DNA, 1149 bp, Escherichia coli
atgaktctgaaagaaaaaacacaatytctgtttgccaacgcatttggctaccctgccactcataccattcaggcgcctggccgcgtgaatttgattggtgaacacaccgactacaacgacggtttcgttctgccctgcgcgattgattatcaaaccgtgatcagctgtgcgccacgcgatgaccgtaaagttcgcgtaatggcagccgattatgaaaatcagcttgatgagttttcccttgatgcgcccattgtcgcgcatgaaaactatcaatgggcgaactacgttcgtggcgtggtgaaacatctgcaactgcgtaacaacagcttcggcggtgtggacatggtgatcagcggcaatgtgccgcagggtgccgggttaagttcttccgcttcactggaagtcgcggtcggaaccgtattgcagcagctttatcatctgccgctggacggcgcacaaatcgcgcttaacggtcaggaagcagaaaaccagtttgttggctgtaactgcgggatcatggatcagctaatttccgcactcggcaagaaagatcatgccttgctgattgactgtcgctcactggggaccaaagcagtttccatgccgaaaggtgtggctgtcgtcatcatcaacagtaacttcaaacgtaccctggttggcagcgaatacaacacccgtcgtgaacagtgcgaaaccggtgcgcgtttcttccagcagccagctctgcgcgatgtcaccattgaagagttcaacgctgttgcacatgagctggacccaatcgtggcgaaacgcgtgcgtcatatcctgactgaaaacgcccgcaccgttgaagctgccagcgcgctggagcaaggcgacctgaaacgtatgggcgagttgatggcggagtctcatgcctctatgcgcgatgatttcgaaatcaccgtgccgcaaattgacactctggtagaaatcgtcaaagctgtgattggcgacaaaggtggcgtacgcatgaccggcggcggatttggcggctgtatcgtcgcgctgatcccggaagagctggtgcctgccgtacagcaagctgtcgcagaacaatatgaagcaaaaacaggtattaaagagactttttacgtttgtaaaccatcacaaggagcaggacagtgctga

SEQ ID NO: 23 - protein, 549 aa, Escherichia coli
MLNQKIQNPNPDELMIEVDLCYELDPYELKLDEMIEAEPEPEMIEGLPASDALTPADRYLELFEHVQSAKIFPDSKTFPDCAPKMDPLDILIRYRKVRRHRDFDLRKFVENHFWLPEVYSSEYVSDPQNSLKEHIDQLWPVLTREPQDHIPWSSLLALPQSYIVPGGRFSETYYWDSYFTMLGLAESGREDLLKCMADNFAWMIENYGHIPNGNRTYYLSRSQPPVFALMVELFEEDGVRGARRYLDHLKMEYAFWMDGAESLIPNQAYRHVVRMPDGSLLNRYWDDRDTPRDESWLEDVETAKHSGRPPNEVYRDLRAGAASGWDYSSRWLRDTGRLASIRTTQFIPIDLNAFLFKLESAIANISALKGEKETEALFRQKASARRDAVNRYLWDDENGIYRDYDWRREQLALFSAAAIVPLYVGMANHEQADRLANAVRSRLLTPGGILASEYETGEQWDKPNGWAPLQWMAIQGFKMYGDDLLGDEIARSWLKTVNQFYLEQHKLIEKYHIADGVPREGGGGEYPLQDGFGWTNGVVRRLIGLYGEP

SEQ ID NO: 24 - DNA, 1650 bp, Escherichia coli
atgctcaatcagaaaattcaaaaccctaatccagacgaactgatgatcgaggtcgatctctgctatgaactggacccgtatgaattaaaactggatgagatgatcgaggcagaaccggaacccgagatgattgaagggctgcccgcctctgatgcgctgacgcctgccgatcgctatctcgaactgttcgagcatgttcagtcggcgaaaattttccccgacagtaaaacctttcccgactgcgcacccaaaatggacccgctggatattttaatccgctaccgtaaagtgcgccgtcatcgtgattttgacttgcgcaagtttgttgaaaatcacttctggctgccggaggtctactccagcgagtatgtatcggacccgcaaaattccctgaaagagcatatcgaccagctgtggccggtgctaacccgcgaaccacaggatcacattccgtggtcttctctgctggcgctgccgcagtcatatattgtcccgggcggccgttttagcgaaacctactattgggattcctatttcaccatgctggggctggcggaaagtggtcgggaagatttgctgaaatgcatggccgataacttcgcctggatgatcgaaaactacggtcacatccccaacggcaaccgcacctattatttgagccgctcgcaaccaccggtttttgcgctgatggtggagttgtttgaagaagatggtgtacgcggtgcgcgccgctatctcgaccacctgaaaatggaatatgccttctggatggacggtgcagaatcgttgatccctaatcaggcctatcgccatgttgtgcggatgccggacggatcgctgctcaaccgttactgggacgatcgcgacacgccgcgtgacgaatcctggcttgaggacgttgaaaccgcgaaacattctggtcgcccgcccaacgaggtgtaccgcgatttacgcgcgggggcggcctccggttgggattactcttcccgttggctccgtgatactggtcgtctggcgagcattcgtaccacccagttcatccccatcgatctgaatgccttcctgtttaaactggagagcgccatcgccaacatctcggcgctgaaaggtgagaaagagacagaagcactgttccgccagaaggccagtgcccgtcgcgatgcggtaaaccgttacctctgggatgatgaaaacggcatctaccgcgattacgactggcgacgcgaacaactggcgctgttttccgctgccgccattgtgccgctctatgtcggtatggcgaaccatgaacaggccgatcgtctggcaaacgccgtgcgcagtcggttactgacacctggcgggattctggcaagcgagtacgaaaccggtgaacagtgggataaacccaacggctgggcaccgttacaatggatggcaattcagggatttaaaatgtatggcgatgaccttctgggcgatgaaatcgcgcgcagctggctgaagacggtgaatcagttttatctggaacagcacaaactgatcgaaaaataccatattgccgatggtgttccccgcgaaggcggcggtggcgagtatccgttgcaggatgggtttggctggactaacggtgtggtacgccgtttaattggtttgtacggcgaaccataa

SEQ ID NO: 25 - protein, 605 aa, Escherichia coli
  misc_feature (334)..(334): Xaa can be any naturally occurring amino acid
MMLNAWHLPVPPFVKQSKDQLLITLWLTGEDPPQRIMLRTEHDNEEMSVPMHKQRSQPQPGVTAWRAAIDLSSGQPRRRYSFKLLWHDRQRWFTPQGFSRMPPARLEQFAVDVPDIGPQWAADQIFYQIFPDRFARSLPREAEQDHVYYHHAAGQEIILRDWDEPVTAQAGGSTFYGGDLDGISEKLPYLKKLGVTALYLNPVFKAPSVHKYDTEDYRHVDPQFGGDGALLRLRHNTQQLGMRLVLDGVFNHSGDSHAWFDRHNRGTGGACHNPESPWRDWYSFSDDGTALDWLGYASLPKLDYQSESLVNEIYRGEDSIVRHWLKAPWNMBGXRLDVVHMLGEAGGARNNLQHVAGITEAAKETQPEAYIVGEHFGDARQWLQADVEDAAMNYRGFTFPLWGFLANTDISYDPQQIDAQTCMAWMDNYRAGLSHQQQLRMFNQLDSHDTARFKTLLGREVARLPLAVVWLFTWPGVPCIYYGDEVGLDGKNDPFCRKPFPWQVEKQDMALFALYQRMIALRKKSQALRRGGCQVLYAEDNVVVFVRVLNQQRVLVAINRGEACEVVLPASPFLNVVQWQRKEGHGQLTDGILALPAISATVWMN

SEQ ID NO: 26 - DNA, 1818 bp, Escherichia coli
atgatgttaaatgcatggcacctgccggtgcccccatttgttaaacaaagcaaagatcaactgctcattacactgtggctgacgggcgaagacccaccgcagcgcattatgctgcgtacagaacacgataacgaagaaatgtcagtaccaatgcataagcagcgcagtcagccgcagccaggcgtcaccgcatggcgtgcggcgattgatctctccagcggacaaccccggcggcgttacagtttcaaactgctgtggcacgatcgccagcgttggtttacaccgcagggcttcagccgaatgccgccggcacgactggagcagtttgccgtcgatgtaccggatatcggcccacaatgggctgcggatcagattttttatcagatcttccctgatcgttttgcgcgtagtcttcctcgtgaagctgaacaggatcatgtctattaccatcatgcagccggacaagagatcatcttgcgtgactgggatgaaccggtcacggcgcaggcgggcggatcaacgttctatggcggcgatctggacgggataagcgaaaaactgccgtatctgaaaaagcttggcgtgacggcgctgtatctcaatccggtgtttaaagctcccagcgtacataaatacgataccgaggattatcgccatgtcgatccgcagtttggcggtgatggggcgttgctgcgcttacgccacaatacgcagcagctgggaatgcggctggtgctggatggcgtgtttaaccacagtggcgattcccatgcctggtttgacaggcacaatcgtggcacggggggagcttgtcacaaccccgaatcgccctggcgcgactggtactcgtttagtgatgatggcacggcgctcgactggcttggctatgccagcttgccgaagctggattatcagtcggaaagtctggtgaatgaaatttatcgcggggaagacagtattgtccgccactggctgaaagcgccgtggaatatgracggctgdcggctggatgtggtgcatatgctgggggaagcgggtggggcgcgcaataatttgcagcacgttgctgggatcaccgaagcggcgaaagaaacccagccggaagcgtatatagttggagagcattttggcgatgcacggcaatggttacaggccgatgtggaagatgccgccatgaactatcgcggcttcacattcccgttgtggggatttcttgccaataccgacatctcttacgatccgcagcaaattgacgctcaaacctgtatggcctggatggataattaccgcgcagggctttctcatcaacagcaattacgtatgtttaatcagctcgacagccacgatactgcgcgatttaaaacgctgctcggtcgggaggttgcgcgcctgcccctggcagtggtctggctgttcacctggcctggtgtaccgtgcatttattacggtgatgaagtgggactggatggcaaaaatgatccgttttgccgtaagccgttcccctggcaggtggaaaaacaggatatggcgttattcgcgttgtaccagcgaatgattgcgctgcgtaagaaaagtcaggcgctgcgtcgtggcggctgtcaggtgctgtatgcggaagataacgtggtggtatttgtccgcgtgctgaatcagcagcgtgtactggtggcaattaaccgtggcgaagcctgtgaagtggtgctacccgcgtcaccgtttcttaatgtcgtgcaatggcaacgcaaagaaggccatgggcaactgacagacgggattctggctttgcctgccatttcggctacggtgtggatgaactaa

SEQ ID NO: 27 - protein, 284 aa, Escherichia coli
MGNGWHEWPLVIFTVLGQCVVGALIVSGIGWFAAKTDADRQHIVRGMFFLWLLMGIGFIASVMHLGSPLRAFNSLNRIGASGLSNEIAAGSIFFAVGGLWWLVAVIGKMPQALGKLWLLVSMALGVIFVWMMTCVYQIDTVPTWHNGYTTLAFFVTVLLSGPILAAAILRAARVTFNTTPFAIISVLALIACAGVIVLQGLSLSSIHSSVQQASALVPDYASLQVWRVVLLCAGLGCWLCPLIRRREPHVAGLILGLILILGGEMIGRVLFYGLHMTVGMAIAG

SEQ ID NO: 28 - DNA, 855 bp, Escherichia coli
atgggaaatggatggcatgaatggccactggttatctttaccgtattgggtcaatgcgtagtaggcgcgctgattgttagcggaattggctggttcgccgccaaaactgacgcagaccgtcagcacattgttcgtggcatgtttttcctctggctgttgatgggcatcgggtttattgcctctgtcatgcacctgggatcgccactgcgggcgtttaactcgctgaatcgaatcggagcttctggtctgagtaacgagattgctgccggttccatattttttgccgttggcggactatggtggctggtggcggtcatcggtaaaatgccgcaagcgttggggaaactctggttacttgtcagcatggcgctcggcgtcattttcgtctggatgatgacctgcgtgtatcaaatcgacactgtgccaacctggcataacggttacactacgctggctttcttcgtgacggtattgttgagtggtccaatacttgctgccgcaattctgcgggcagcccgcgttacatttaataccacaccatttgccatcattagcgttctggcgctgatcgcttgcgccggggtgattgtgctgcaaggtttgtctctgtcgtctattcactcatccgtgcaacaagccagcgcactggtaccagattacgcctccttacaggtctggcgtgtggtattgttatgcgcaggtctaggatgctggctttgtccgctcatacgtcgccgtgaacctcacgttgccggacttattctggggttaatcctcattcttggcggtgagatgatcgggcgtgtgctcttttatggcctgcacatgacggtaggaatggctattgcaggttaa

SEQ ID NO: 29 - protein, 287 aa, Escherichia coli
MGSGWHEWPLMIFTVFGQCVAGGFIVLALALLKGDLRAEAQQRVIACMFGLWVLMGIGFIASMLHLGSPMRAFNSLNRVGASALSNEIASGSIFFAVGGIGWLLAMLKKLSPALRTLWLVVTMVLGVVFVWMMVRVYNSIDTVPTWYSIWTPMGFFLTMFMGGPLLGYLLLSLAGVDGWAMRLLPAISVLALVVSGVMSVMQGTELATIHSSVQQAAALVPDYGALMSWRIVLLAVALCLWIAPQLKGYQPAVPLLSVSFILLLAGELIGRGVFYGLHMTVGMAVAS

SEQ ID NO: 30 - DNA, 864 bp, Escherichia coli
atgggaagtggatggcatgaatggccgctgatgatcttcacggtcttcgggcaatgtgtggcgggtggttttatcgttctggctttggcgctgcttaaaggcgacctgcgagcagaagcccagcagcgtgttatcgcctgcatgtttggcttatgggtgctgatgggcattggctttatcgcctctatgctccatcttggttcaccgatgcgcgcctttaactcgctcaaccgggtaggggcttcagcactcagtaacgaaatcgccagcggttcgatcttttttgctgtaggcggcatcggctggttgctggcaatgctgaaaaagctgtcacctgcattgcgtacgctatggctggtggtgacgatggttcttggcgtcgtctttgtctggatgatggtgcgtgtgtataacagcattgataccgttccgacctggtacagcatctggacgccgatgggcttcttcctgacgatgttcatgggcggcccgttactgggttacctgttgctgagtctggctggcgtcgatggctgggcgatgcgtctgctgccagccatttctgtactggcactggtggtgagtggcgtgatgtcagtgatgcagggcacagagctggcaactattcatagttctgtgcagcaggccgcagcgctggtgccggactatggtgcgctgatgtcctggcgaatcgtgcttttggccgttgccctgtgcttgtggattgcaccacagctaaaaggttatcagcctgcggttccgctactatccgtctcattcattctgcttctggcaggggaattaatcggtcgcggcgtattctatggtttgcatatgaccgtggggatggccgtcgcaagctaa

SEQ ID NO: 31 - protein, 350 aa, Escherichia coli
  misc_feature (203)..(203): Xaa can be any naturally occurring amino acid
MRFLLGVLMLMISGSALATIDVLQFKDEAQEQQFRQLTEELRCPKCQNNSIADSNSMIATDLRQKVYELMQEGKSKKEIVDYMVARYGNFVTYDPPLTPLTVLLWVLPVVAIGIGGWVIYARSRRRVRVVPEAFPEQSVPEGKRAGYVVYLPGIVVALIVAGVSYYQTGNYQQVKIWQQATAQAPALLDRALDPKADPLNEEXMSRLALGMRTQLQKNPGDIEGWIMLGRVGMALGNASIATDAYATAYRLDPKNSDATLGYAEALTRSSDPNDNRLGGELLRQLVRTDHSNIRVLSMYAFNAFEQQRFGEAVAAWEMMLKLLPANDTRRAVIERSIAQAMQHLSPQESK

SEQ ID NO: 32 - DNA, 1053 bp, Escherichia coli
atgaggtttttattgggcgtgctgatgctgatgatctccggctcagcgctggcgaccatcgacgtgttgcagtttaaagatgaagcacaggaacaacagttccgtcagctcactgaagaactgcgctgcccgaaatgccagaataacagcattgccgattccaactcgatgattgccaccgacctgcgccagaaagtgtatgaactgatgcaggaaggcaaaagtaagaaagagattgtcgattatatggtggcgcgttacggcaacttcgtcacttacgatccgccgttaacgccgctgaccgtgctgctgtgggtgcttccggtagtggctattggtattggcggttgggtcatatacgcccgttcgcggcgtcgggtacgcgtggtaccggaagcgtttcctgaacaaagcgtgccggaaggtaagcgtgccggatatgttgtttatctgccgggtattgtggtggcgttaattgtggctggcgtcagctactaccagactggcaattatcagcaggtgaaaatctggcagcaggccacggcacaggctccggcgttgctggacagggcgctggatccgaaagccgatccgctcaacgaagaaragatgtcgcgccttgcgctggggatgcgtactcaactgcaaaaaaatccgggagatatagaaggttggattatgttgggtcgcgttggcatggcgctgggtaacgccagtatcgccaccgatgcatacgctactgcgtatcgcctcgatccgaaaaacagcgatgccacactgggttatgctgaagcgttgacacgttcatctgatcccaacgacaaccgcctcggcggcgaactgctgcgccagttggtgagaacggaccatagcaatattcgtgtgttaagcatgtatgcgtttaatgcctttgagcagcagcgatttggcgaagccgttgccgcgtgggagatgatgttgaaactcttacctgccaacgatactcgccgtgcggtgattgaacgtagtatcgcgcaggcgatgcaacatttgtcgccgcaggagagtaaataa

SEQ ID NO: 33 - protein, 672 aa, Escherichia coli
MSYPSLFAPLDLGFTTLKNRVLMGSMHTGLEEYPDGAERLAAFYAERARHGVALIVSGGIAPDLTGVGMEGGAMLNDASQIPHHRTITEAVHQEGGKIALQILHTGRYSYQPHLVAPSALQAPINRFVPHELTHEEILQLIDDFARCAQLAREAGYDGVEVMGSEGYLINEFLTLRTNQRSDQWGGDYHNRMRFAVEVVSAVRERVGNDFIIIYRLSMLDLVEGGGTFAETVELAQAIEAAGATIINTGIGWHEARIPTIATPVPRGAFSWVTRKLKGHVSLPLVTTNRINDPQVADDILSRGDADMVSMARPFLADAELLSKAQSGRADEINTCIGCNQACLDQIFVGKVTSCLVNPRACHETKMPILPAMQKKNLAVVGAGPAGLAFAINAAARGHQVTLFDAHSEIGGQFNIAKQIPGKEEFYETLRYYRRMIEVTGVTLKLNHTVTADQLQAFDETILASGIVPRTPPIDGIDHPKVLSYLDVLRDKAPVGNKVAIIGCGGIGFDTAMYLSQPGESTSQNIAGFCNEWGIDSSLQQAGGLSPQGMQIPRSPRQIVMLQRKASKPGQGLGKTTGWIHRTTLLSRGVKMIPGVSYQKIDDDGLHVVINGETQVLAVDNVVICAGQEPNRALAQPLIDSGKTVHLIGGCDVAMELDARRAIAQGTRLALEI

SEQ ID NO: 34 - DNA, 2019 bp, Escherichia coli
atgagctacccgtcgctgttcgccccgctggatttaggttttaccacgttaaaaaaccgcgtgttgatgggttcaatgcacaccgggctggaggaatacccggacggtgctgaacggctggcagcgttttatgccgaacgcgcccgtcacggcgtggcgctgattgttagcggcggcattgcaccagatttaacaggcgttggcatggaaggcggcgcaatgctcaatgacgccagccagatcccacaccatcgcaccattaccgaagcggtacatcaggaaggcggcaaaatagccctgcaaattttgcataccgggcgctacagctaccaaccgcatctggtcgcaccgtccgcattgcaggcccccatcaaccgtttcgttcctcatgaactcacccatgaagagatcctgcaactgatcgacgatttcgcccgctgcgcgcaactggcacgggaggcaggatacgacggtgtagaggtaatgggttccgaagggtatttgatcaacgaatttctgacgctgcgcaccaatcagcgcagtgaccagtggggcggcgattaccacaaccggatgcggtttgccgttgaagtggtgagtgcggtacgcgaacgcgttggcaacgacttcattattatctaccgactgtcgatgctcgacctggtcgaaggcggcgggacttttgccgaaacggtagagctggcgcaggccattgaagcggcgggcgcgaccattatcaacaccggcattggctggcatgaagcgcgtattccgaccatcgccacgcccgtgccacgcggcgcatttagctgggtcacgcgcaaactgaaaggtcacgtctcgctgccgctggtgaccaccaaccggattaacgatccgcaggttgccgacgatattctctcgcgcggcgatgccgatatggtatcgatggcgcgaccgtttcttgcggatgcggaactgctgtcaaaagcgcaatcagggcgagccgatgagatcaacacctgcattggctgcaaccaggcgtgtctcgatcagatcttcgttggcaaggtcacctcgtgtctggtgaatcctcgcgcctgccatgaaaccaaaatgccgatccttcccgccatgcagaaaaaaaatctggcggtggtcggtgcgggacctgctgggctggcgtttgccattaacgcggcggcgcgtggtcatcaggtaacgttgtttgacgcgcacagtgagatcggcgggcagtttaatatcgccaaacagatccccggcaaagaggagttttacgaaacgctgcgctattaccgccggatgatcgaagtgacgggcgtgacgctaaaactcaatcacaccgtgacggcggatcagttacaggcgttcgatgaaacgatcctcgccagtgggatcgtgccgcgcactccgcccatcgacgggatcgatcatccgaaggtattgagttatctcgatgtactgcgcgacaaagcgccggtgggcaacaaagttgccatcatcggttgtggcgggattggttttgatacggcgatgtatttaagtcagccgggcgaatccaccagccagaatatcgccgggttctgtaatgaatgggggatcgacagcagcctacaacaggctggtggcttaagcccgcagggaatgcagatcccgcgtagcccacggcagattgtgatgctccagcgcaaagccagcaaaccgggacaggggttaggcaaaaccaccggctggatccatcgcaccaccctgctctcgcggggtgtgaaaatgatcccaggcgtaagttatcagaagattgacgatgacgggctgcatgtggtgatcaacggcgaaacgcaggtattagcagtggacaatgtggtgatctgcgcagggcaagagccaaaccgcgcattggcgcagccgctgattgatagcgggaaaacggtgcatttaattggcggctgcgatgtggctatggagctggacgcacgacgggcaattgcccagggaacacggctggcgctggagatttaa

SEQ ID NO: 35 - protein, 552 aa, Escherichia coli
  misc_feature (484)..(484): Xaa can be any naturally occurring amino acid
MLTPLTAFAGVRLRWPAMMRLTCIGILAQFALLLLAFGVLTYCFLISDFSVIYVAQHSYSLLSWKLKLAAVWGGHEGSLLLWVLLLSAWSALFAWQYRQQTDPLFPLTLAVLSLMLAALLLFVVLWSDPFVRIFPPAIEGRDLNPMLQHPGLIFHPPLLYLGYGGLMVAASVALASLLRGEFDGACARICWRWALPGWSALTAGIILGSWWAYCELGWGGWWFWDPVENASLLPWLSATALLHSLSLTRQRGIFRHWSLLLAIVTLMLSLLGTLIVRSGILVSVHAFALDNVRAVPLFSLFALISLASLALYGWRARDGGPAVRFSGLSREMLILATLLLFCAVLLIVLVGTLYPMIYGLLGWGRLSVGAPYFNRATLPFGLLMLVVIVLATFVSGKRAQLPALLAHAGILLFAAGIVVSSVSRQEISLNLQPGQQVTLAGYTFRFERLDLQAKGNYTSEKAIVALFDHQQRIGELTPERRFYXARRQQMMEPSIRWNGIHDWYAVMGEKTGADRYAFRLYVQSGVRWIWGGGLLMIAGALLSGWRGKKRDV

SEQ ID NO: 36 - DNA, 1659 bp, Escherichia coli
gtgttgaccccgttgacggcctttgcgggagtgcggttgcgctggcctgccatgatgcgactcacttgcatcggcattctggcacagttcgcgctcctgctgctcgcctttggcgtactgacgtattgttttctcatcagcgatttctcggtcatttatgtcgcccaacatagctacagcttgctgtcgtggaaactcaaactggcggcggtgtggggcggtcatgaaggttcgctgctgctttgggtgctgctgctttccgcctggagcgcgctgtttgcctggcaatatcggcagcaaaccgatccgctatttccgctgacgctagccgttttatctctcatgctcgccgcactgctactgtttgtagtgctgtggtccgatcccttcgtgcggatatttccaccagcaatcgaaggccgcgatctcaatccgatgctgcaacatcccggtcttatctttcatccaccgctgctttaccttggctatggcggtttgatggtagcggcgagcgtggcgctggcgagtctactgcgcggcgagtttgatggtgcctgcgcccgaatttgctggcgctgggcgttacctggctggagtgcattaactgcggggatcatcctcggttcctggtgggcctactgcgaactcggctggggcggctggtggttctgggatccggtggaaaacgcctctttattaccctggctttctgccactgcgctgctgcacagtttatccctgacacgccagcgggggatttttcgccactggtcgctgttgttggcgatagttactctgatgctgtcgctgctgggcaccttaattgtccgttctggcattctggtttcggttcatgcgttcgctctggataacgttcgcgctgtgccgttgttcagcctgtttgcactgattagccttgcgtctctggctctgtatggctggcgagcgcgggacggtggcccggcggtgcgtttttcggggttatcgcgggaaatgttaatcctcgctacgctgttgctgttttgcgcagtgctactgatcgtgctggtgggaacgctttatccgatgatttacggcctgctgggctggggacgtctctccgttggcgcaccgtattttaaccgcgcgacgttaccgtttggtctgttgatgttggtggtgattgtgctggcgacgtttgtctctggcaaacgcgcgcagcttccggcgctgctggcgcatgcgggcatactgttatttgccgcagggatcgttgtctccagcgtcagccgtcaggagatcagcctgaatttacagccgggtcagcaggtgacgctggcaggatacaccttccgttttgagcgcctcgatctgcaagccaaaggcaattacaccagcgaaaaagcgatagtggcgctgtttgaccatcagcaacgcattggtgaattaacgccggagcggcgtttttackaagctcgtcgtcagcaaatgatggaaccgtcaattcgctggaacggcatccatgactggtatgcggtcatgggggagaaaactggagcggatcgttacgcttttcgcttgtatgtacaaagcggtgtgcgctggatctgggggggaggattgttgatgattgcgggcgcattgttaagcggatggcgggggaagaagcgcgatgtataa

SEQ ID NO: 37 - protein, 494 aa, Escherichia coli
MSRPRLIVALFLFFNVFVHGENKVKQSTIALALLPLLFTPVTKARTPEMPVLENRAAQGDITAPGGARRLTADQTAALRDSLSDKPAKNIILLIGDGMGDSEITAARNYAEGAGGFFKGIDALPLTGQYTHYALNKKTGKPDYVTDSAASATAWSTGVKTYNGALGVDIHEKDHPTILEMAKAAGLATGNVSTAELQDATPAALVAHVTSRKCYGPSATSEKCPGNALEKGGKGSITEQLLNARADVTLGGGAKTFAETATAGEWQGKTLREQAQARGYQLVSDAASLNSVTEANQQKPLLGLFADGNMPVRWLGPKATYHGNIDKPAVTCTPNPQRNDSVPTLAQMTDKAIELLSKNEKGFFLQVEGASIDKQDHAANPCGQIGETVDLDEAVQRALEFAKKDGNTLVIVTADHAHASQIVAPDTKAPGLTQALNTKDGAVMVMSYGNSEEDSQEHTGSQLRIAAYGPHAANVVGLTDQTDLFYTMKAALGLK

SEQ ID NO: 38 - DNA, 1485 bp, Escherichia coli
ttgtcacggccgagacttatagtcgctttgtttttattttttaatgtatttgtacatggagaaaataaagtgaaacaaagcactattgcactggcactcttaccgttactgtttacccctgtgacaaaagcccggacaccagaaatgcctgttctggaaaaccgggctgctcagggcgatattactgcacccggcggtgctcgccgcttaacggctgatcagaccgccgctctgcgtgattctcttagcgataaacctgcaaaaaatattattttgctgattggcgatgggatgggggattcggaaattactgccgcacgtaattatgccgaaggtgcgggcggcttttttaaaggtatcgatgccttaccgcttaccgggcaatacactcactatgcgctgaataaaaaaaccggaaaaccggactacgtcaccgactcggctgcatcagcaaccgcctggtcaaccggtgtcaaaacctataacggcgcgctgggcgtcgatattcacgaaaaagatcacccaacgattctggaaatggcaaaagccgcaggtctggcgaccggtaacgtttctaccgcagagttgcaggatgccacgcccgccgcgctggtggcgcatgtgacctcgcgcaaatgctacggtccgagcgcgaccagtgaaaaatgtccgggtaacgctctggaaaaaggcggaaaaggatcgattaccgaacagctgcttaacgctcgtgccgacgttacgcttggcggcggcgcaaaaacctttgctgaaacggcaaccgctggtgaatggcagggaaaaacgctgcgtgaacaggcacaggcgcgtggttatcagttggtgagcgatgctgcctcactgaattcggtgacggaagcgaatcagcaaaaacccctgcttggcctgtttgctgacggcaatatgccagtgcgctggctaggaccgaaagcaacgtaccacggtaatatcgataagcccgcagtcacctgtacgcctaatccgcaacgtaatgacagtgtaccgaccctggcacagatgaccgacaaagccattgaattgttgagtaaaaatgagaaaggctttttcctgcaagttgaaggtgcgtcaatcgataaacaggatcatgctgcgaatccttgtgggcaaattggcgagacggtcgatctcgatgaagccgtacaacgggcgctggaattcgccaaaaaggatggtaacacgctggtcatagtcaccgctgatcacgcccacgccagccagattgttgcgccggataccaaagctccgggcctcactcaggcgctaaataccaaagatggcgcagtgatggtgatgagttacgggaactccgaagaggattcacaagaacataccggcagtcagttgcgtattgcggcgtatggcccgcatgccgccaatgtcgttggactgaccgaccagaccgatctcttctacaccatgaaagccgctctggggctgaaataa

SEQ ID NO: 39 - protein, 400 aa, Escherichia coli
MQSVDVAIVGGGMVGLAVACGLQGSGLRVAVLEQRVPEPLAADAPPQLRVSAINAASEKLLTRLGVWQDILSRRASCYHGMEVWDKDSFGHISFDDQSMGYSHLGHIVENSVIHYALWNKAQQSSDITLLAPAELQQVAWGENETFLTLKDGSMLTARLVIGADGANSWLRNKADIPLTFWDYQHHALVATIRTEEPHDAVARQVFHGEGILAFLPLSDPHLCSIVWSLSPEEAQRMQQASEDEFNRALNIAFDNRLGLCKVESARQVFPLTGRYARQFAAHRLALVGDAAHTIHPLAGQGVNLGFMDAAELIAELKRLHRQGKDIGQYIYLRRYERSRKHSAALMLAGMQGFRDLFSGTNPVKKLLRDIGLKLADTLPGVKPQLIRQAMGLNDLPEWLR

SEQ ID NO: 40 - DNA, 1203 bp, Escherichia coli
atgcaaagtgttgatgtagccattgttggcggcggcatggtggggctggcggttgcctgcggcttacagggtagcggcttacgcgttgccgtactggagcagcgcgtaccggaacctctggcggcggatgcaccaccacaactgcgcgtttcggctatcaatgccgccagcgaaaaattactcacccgtcttggcgtctggcaggacattctctctcgccgagccagctgttatcacggtatggaagtgtgggacaaagacagttttggtcacatctcgtttgacgatcaaagcatgggctatagccatcttgggcacatcgttgaaaactcagtgattcactacgcgctgtggaacaaagcgcagcagtcgtcagatatcactcttttggcccccgcagaattacagcaggtcgcctggggagaaaatgaaaccttcctgacgctgaaagatggcagtatgttaactgcgcgtctggtgattggcgcggacggcgctaattcctggttgcgcaacaaagccgatattccgctgactttctgggattatcagcatcacgcgctggtagcgaccatacgcacggaagaaccgcatgatgcggtggcgcggcaggttttccatggcgaaggcattctggcctttttaccgcttagcgatccgcatctttgctcgattgtctggtcactgtcgccagargaagcgcagcggatgcagcaggcaagtgaagacgaatttaatcgcgcgttaaatatcgcttttgataatcgcctgggcttatgcaaggttgagagcgcgcgtcaggtgttcccactgacggggcgttatgcgcgccagtttgccgcgcaccgtctggcgctggtgggcgacgccgcgcataccattcacccgctggcggggcagggggtaaatcttggctttatggatgctgcagagctgattgctgaactgaaacggttgcatcgtcagggtaaagacatcgggcagtacatttatctgcgtcgctatgagcgtagccgcaagcacagtgcggcgctgatgctggctggtatgcagggattccgcgatctgttttctggtaccaatccggtgaaaaaactgctgcgtgatattggtctgaaactggccgacacgcttcctggcgttaaaccacaacttatccgccaggcaatgggattaaacgatttgcctgaatggctgcgttaa

SEQ ID NO: 41 - protein, 510 aa, Escherichia coli
MTQKIEQSQRQERVAAWNRRAECDLAAFQNSPKQTYQAEKARDRKLCANLEEAIRRSGLQDGMTVSFHHAFRGGDLTVNMVMDVIAKMGFKNLILASSSLSDCHAPLVEHIRQGVVTRIYTSGLRGPLAEEISRGLLAEPVQIHSHGGRVHLVQSGELNIDVAFLGVPSCDEFGNANGYTGKACCGSLGYAMVDADNAKQVVMLTEELLPYPHNPASIEQDQVDLIVKVDRVGDAAKIGAGATRMTTNPRELLIARSAADVIVNSGYFKEGFSMQTGTGGASLAVTLFLEDKMRSRDIRADFALGGITATMVDLHEKGLIRKLLDVQSFDSHAAQSLARNPNHIEISANQYANWGSKGASVDRLDVVVLSALEIDTQFNVNVLTGSDGVLRGASGGHCDTAIASALSIIVAPLVRGRIPTLVDNVLTCITPGSSVDILVTDHGIAVNPARPELAERLQEAGIKVVSIEWLRERARLLTGEPQPIEFTDRVVAVVRYRDGSVIDVVHQVKE

SEQ ID NO: 42 - DNA, 1533 bp, Escherichia coli
atgacgcagaaaattgaacaatctcaacgacaagaacgggtagcggcctggaatcgtcgcgctgaatgcgatcttgccgctttccagaactcaccaaagcaaacctaccaggctgaaaaagcgcgcgatcgcaaactgtgcgccaacctggaagaagcgattcgtcgctctggtttacaggacggcatgacggtttccttccatcacgctttccgtggcggtgacctgaccgtcaatatggtgatggacgtcatcgcgaagatgggctttaaaaacctgatcctggcgtccagctccctgagtgattgccatgcgccgctggtagaacacattcgccagggcgtggttacccgcatttatacctccggcctgcgtggtccactggcggaagagatctcccgtggtctgctggcggaaccggtgcaaatccactctcacggcggacgtgtgcatctggtacagagcggcgaactgaatatcgacgtggctttcctcggcgtcccgtcctgtgatgaattcggtaatgccaacggctacaccggtaaagcctgctgcggctccctcggctatgcaatggttgatgccgacaacgcaaaacaggttgtgatgcttaccgaagaactgctgccttatccgcataatccggcaagcattgagcaagatcaggttgatttaatcgtcaaagttgatcgcgttggcgatgctgcaaaaatcggcgctggtgctacccgtatgaccactaacccgcgcgaactgcttattgcccgtagcgctgcggatgtgattgtcaactcaggctacttcaaagaaggtttctccatgcaaaccggcaccggcggcgcatcgctggcggtaacccttttcctggaagacaaaatgcgtagccgcgatattcgcgccgacttcgccctcggtggtattaccgcgacgatggttgatctgcacgaaaaaggtctgatccgcaaactgctggatgtacagagctttgacagccacgctgcgcaatcgctggcccgtaaccccaatcacatcgaaatcagcgccaaccagtacgctaactggggttcgaaaggtgcatcggttgatcgtctcgacgtggtggtactgagcgcgctggaaattgacacccagttcaacgttaacgtgctgaccggctctgacggcgtactgcgtggtgcttccggtggtcactgcgataccgcgattgcctctgcgctttccatcatcgtcgcgccgctggtacgcggtcgtattccgactctggtggataacgtgctgacctgcatcaccccgggctccagtgtcgatattctggtcacagaccacggtatcgcagttaacccggcacgtccggaactggcagaacgtctgcaggaagcgggcattaaagtggtttccattgagtggctgcgcgaacgtgcgcgtctgctgaccggtgaaccacagccgattgaattcaccgaccgcgtcgttgccgttgtgcgttaccgcgatggctcggtgatcgatgttgtgcatcaggtgaaggaataa

SEQ ID NO: 43 - protein, 391 aa, Escherichia coli
  misc_feature (331)..(331): Xaa can be any naturally occurring amino acid
MTNQPTEIAIVGGGMVGGALALGLAQHGFTVTVIEHAEPAPFVADSQPDVRISAISAASVSLLKGLGVWDAVQAMRCHPYRRLETWEWETAHVVFDAAELKLPLLGYMVENTVLQQALWQALEAHPKVTLRVPTSLIALHRDNDLQELELKGGEVIRAKLVIGADGANSQVRQMAGIGVHAWQYAQSCMLISVQCENDPGDSTWQQFTPDGPRAFLPLFDNWASLVWYDSPARIRQLQNMNMAQLQVEIAKHFPSRLGYVTPLAAGAFPLTRRHALQYVQPGLALVGDAAHTIHPLAGQGVNLGYRDVDALIDVLVNARSYGEAWASYPVXKRYQMRRMADNFIMQSGMDLFYAGFSNNLPPLRFVRNLGLMAAERAGVLKRQALKYALGL

SEQ ID NO: 44 - DNA, 1176 bp, Escherichia coli
atgacaaatcaaccaacggaaattgccattgtcggcggaggaatggtcggcggcgcactggcgctggggctggcacagcacggatttacggtaacggtgatcgagcacgcagaacctgcaccgtttgtcgctgatagccaaccggacgtgcggatctcggcgatcagcgcggcttcggtatcattgcttaaagggttaggggtctgggatgcagtacaggctatgcgttgccatccttaccgcagactggaaacgtgggagtgggaaacggcgcatgtggtatttgacgcagccgaattaaagttgccgttgcttggctatatggtagaaaacactgtcctgcaacaggcattgtggcaggcgctggaagcgcatccgaaagtaacgttacgtgtgccaacctcgctgattgcattacatcgagataatgatcttcaggagctggagctgaaaggcggtgaagtgattcgcgcgaagctggtgattggtgccgacggcgcaaattcgcaggtgcggcagatggcgggaattggcgttcatgcatggcagtatgcgcagtcgtgcatgttgattagcgtccagtgcgagaacgatcccggcgatagcacctggcagcaatttaccccggatggaccgcgcgcgtttctgccgctgtttgataactgggcatcgctggtgtggtacgactctccggcgcgcattcgccagttgcagaatatgaatatggcgcagttacaggtggaaatcgcgaagcatttcccgtcgcgtctgggttacgttacaccgcttgccgctggtgcgtttccgctgacacgccgccatgcgttgcagtatgtkcagccggggcttgcgctggtgggtgatgccgcgcacaccatccatccgctggcggggcagggggtgaatcttggttatcgtgatgtcgatgccctgattgatgttctggtgaatgcccgcagctacggcgaagcgtgggccagttatcctgtcytcaagcgttaccagatgcggcgcatggcggataacttcattatgcagagcggtatggatctgttttatgccggattcagtaataatctgccgccgctgcgttttgtgcgtaatcttggtttgatggcggcggagcgtgctggcgtgttgaaacgtcaggcgctgaaatatgcgttagggttgtag

SEQ ID NO: 45 - protein, 307 aa, Escherichia coli
  misc_feature (296)..(296): Xaa can be any naturally occurring amino acid
MGGLPMISASLQQRKTRTRRSMLFVPGANAAMVSNSFIYPADALMFDLEESVALREKDTARRMVYHALQHPLYRDIETIVRVNALDSEWGVNDLEAVVRGGADVVRLPKTDTAQDVLDIEKEILRIEKACGREPGSTGLLAAIESPLGITRAVEIAHASERLIGIALGAEDYVRNLRTERSPEGTELLFARCSILQAARSAGIQAFDTVYSDANNEAGFLQEAAHIKQLGFDGKSLINPRQIDLLHNLYAPTQKEVDHARRVVEAAEAAAREGLGVVSLNGKMVDGPVIDRARLVXSRAELSGIREE

SEQ ID NO: 46 - DNA, 924 bp, Escherichia coli
atgggaggattgccaatgatttccgcttcgctgcaacaacgtaaaactcgcacccgccgcagcatgttgtttgtgcctggtgccaatgccgcgatggtcagcaactccttcatctacccggctgatgccctgatgtttgacctcgaagagtccgtggcattacgtgaaaaagacaccgcccgccgcatggtttatcacgcgctgcaacatccgctgtatcgcgatattgaaaccattgtgcgtgtaaacgcgctggattccgaatggggtgttaacgacctggaagccgtcgttcgcggtggtgcggacgttgtacgtctgccgaaaaccgataccgctcaggatgttctggatatcgaaaaagagatcctgcgtatagaaaaagcctgtggtcgtgaacccggcagcaccggcctgctggcggcgattgaatctccgctgggcattacccgcgcagtggaaatcgctcacgcttccgagcgtttgatcggtatcgccctcggtgcagaagactatgtgcgcaacctgcgtacagaacgctccccggaaggaactgaactgctgttcgcacgctgttccattttgcaggccgcgcgctctgcgggtattcaggcgttcgataccgtctattccgacgctaacaacgaagccggattcctgcaagaagccgcccacatcaaacagctgggctttgacggcaaatcgctgatcaacccgcgtcagattgatctgctgcacaacctstacgcaccgacccagaaagaagtggatcacgcccgccgcgtcgtagaagccgctgaagccgccgctcgcgaaggcctcggcgtggtttccctgaacggcaagatggtggacggtccggttatcgatcgtgcccgtctggtgytctcccgtgcagaactttccggcatccgcgaagaataa

SEQ ID NO: 47 - protein, 169 aa, Escherichia coli
  misc_feature (12)..(12): Xaa can be any naturally occurring amino acid
MKANKQNKEEHXMPNIVLSRIDERLIHGQVGVQWVGFAGANLVLVANDEVAEDPVQQNLMEMVLAEGIAVRFWTLQKVIDNIHRAADRQKILLVCKTPADFLTLVKGGVPVNRINVGNMHYANGKQQIAKTVSVDAGDIAAFNDLKAAGVECFVQGIPTEPAVDLFKLL

SEQ ID NO: 48 - DNA, 510 bp, Escherichia coli
gtgaaggccaataagcaaaacaaagaggaacacgytatgccaaatattgttttaagccggattgatgaacgcttgattcacggtcaggtcggcgttcagtgggtcggatttgcgggggcaaatctggtgctggtcgccaacgatgaggttgccgaagatccggtacaacaaaacctgatggaaatggtactggcagaagggatcgccgtacgtttctggacgctgcaaaaagttatcgacaacattcatcgcgccgccgatcgacagaaaatcctgctggtttgtaaaacacccgccgatttcctgacgctggtgaaaggtggcgttccggtgaatcgcattaacgttggcaatatgcactacgccaatggcaagcaacaaatcgccaaaacggtttctgtggatgcgggcgatatcgcagcatttaacgacctgaaagccgctggggtggaatgcttcgttcagggcatcccgacagagcctgctgtggacctctttaaattactttga

SEQ ID NO: 49 - protein, 956 aa, Escherichia coli
MIIHFTLNGAPQELTVNPGENVQKLLFNMGMHSVRNSDDGFGFAGSDAIIFNGNIVNASLLIAAQLEKADIRTAESLGKWNELSLVQQAMVDVGVVQSGYNDPAAALIITDLLDRIAAPTREEIDDALSGLFSRDAGWQQYYQVIELAVARKNNPQATIDIAPTFRDDLEVIGKHYPKTDAAKMVQAKPCYVEDRVTADACVIKMLRSPHAHALITHLDVSKAEALPGVVHVITHLNCPDIYYTPGGQSAPEPSPLDRRMFGKKMRHVGDRVAAVVAESEEIALEALKLIEVEYEVLKPVMSIDEAMAEDAPVVHDEPVVYVAGAPDTLEDDNSHAAQRGEHMIINFPIGSRPRKNIAASIHGHIGDMDKGFADADVIIERTYNSTQAQQCPTETHICFTRMDGDRLVIHASTQVPWHLRRQVARLVDMKQHKVHVIKERVGGGFGSKQDILLEEVCAWATCVTGRPVLFRYTREEEFIANTSRHVAKVTVKLGAKKDGRLTAVKMDFRANTGPYGNHSLTVPCNGPALSLPLYPCDNVDFQVTTYYSNICPNGAYQGYGAPKGNFAITMALAELAEQLQIDQLEIIERNRVHEGQELKILGAIGEGKAPTSVPSAASCALEEILRQGREMIQWSSPKPQNGDWHIGRGVAIIMQKSGIPDIDQANCMIKLESDGTFIVHSGGADIGTGLDTVVTKLAAEVLHCPPQDVHVISGDTDHALFDKGAYASSGTCFSGNAARLAAENLREKILFHGAQMLGEPVADVQLATPGVVRGKKGEVSFGDIAHKGETGTGFGSLVGTGSYITPDFAFPYGANFAEVAVNTRTGEIRLDKFYALLDCGTPVNPELALGQIYGATLRAIGHSMSEEIIYDAEGHPLTRDLRSYGAPKIGDIPRDFRAVLVPSDDKVGPFGAKSISEIGVNGAAPAIATAIHDACGIWLREWHFTPEKILTALEKI

SEQ ID NO: 50 - DNA, 2871 bp, Escherichia coli
atgatcatccactttactttaaatggcgcgcctcaggagctaaccgttaatccaggcgaaaacgtgcaaaagctgttgtttaacatgggaatgcactctgtacgcaacagtgatgatggtttcgggtttgccggttctgacgcaatcatctttaacggtaatatcgttaacgcgtccttgcttattgccgcacagttagagaaggcagatattcgtaccgcagaatctctgggcaaatggaacgagttaagtctggttcaacaggcaatggttgatgttggcgtggtgcagtctggttataacgatccagctgcagctctgattatcaccgatcttctcgatcgcatcgccgcacctacccgcgaagagatcgacgacgcgctttctggtttgttcagccgcgatgctggctggcagcaatactatcaggtcattgaactggcggttgcacgtaaaaataatccgcaggccaccattgatatcgctccgactttccgtgacgaccttgaagtcattggcaagcattatcctaaaactgatgccgcgaaaatggtgcaggcgaaaccctgctatgttgaagaccgcgtaacggctgacgcctgcgtcattaaaatgttacgtagcccacacgctcacgcactgattactcatctggatgtcagcaaagctgaagccttaccgggcgtcgttcacgttattactcacctgaattgccctgatatctactataccccggggggtcagagcgcaccggaaccgtcaccgcttgaccgccgtatgttcggcaaaaaaatgcgtcacgtcggcgatcgcgttgctgcggtggtcgctgaaagtgaagaaattgcgctcgaagcattgaaactcatcgaggttgaatatgaagtgcttaagccggtaatgtcgatcgacgaagcaatggcggaagatgcgcctgtcgtgcacgatgaaccggtggtgtatgttgctggtgcgccagatactctggaagacgataacagccatgcagcccagcgcggcgagcatatgatcatcaacttcccgatcggttctcgccctcgcaaaaatatcgccgctagtattcatggtcatattggcgatatggacaaaggctttgccgatgccgatgtgatcattgagcgaacctataactcaacgcaggcgcagcagtgcccgactgaaacacatatctgctttacccggatggacggcgatcgtctggttatccacgcctccacccaggtaccatggcacttacgccgccaggtcgcgcgcctcgtggacatgaaacagcataaagttcatgtcattaaagagcgagttggcggcggttttggttccaaacaggacatcctgctggaagaagtgtgcgcctgggcaacctgcgtgaccgggcgtccggtactgttccgctacacccgtgaagaagagtttattgctaacacctctcgtcacgtcgcgaaagtcaccgtcaaactgggagcgaaaaaagatggtcgcctgacggcagtgaagatggatttccgcgccaacactggcccttacggcaaccactcactcaccgtaccgtgtaacggaccggcgctgtcgctgccgttatatccgtgcgataacgtcgatttccaggtcaccacctactacagcaacatttgcccaaatggtgcttatcagggttatggcgcaccgaaaggtaayttcgctatcaccatggcattagcggaactggctgaacagttacagatcgaccaactggaaattatcgaacgtaaccgggtacacgaagggcaagagctgaaaattctcggtgcaatcggtgaaggtaaagcgccgacctccgttccttccgccgccagctgcgcactggaagagatcctgcgtcaggggcgcgagatgatccaatggtcttcaccaaaaccacaaaatggtgactggcacatcggtcgtggtgtcgccattatcatgcagaaatcagggatcccggatatcgatcaggctaactgcatgatcaaactggaatcagacggtacctttatcgttcattctggcggtgcggatattggtactggtctggataccgtggtgacgaaactggcagcagaagtgctgcactgcccaccgcaggacgtgcatgttatctccggtgataccgatcatgcgttgtttgataaaggcgcatatgcctcgtccggtacttgcttctcgggtaacgcggcgcgtttggcagcggaaaatctgcgggagaaaattctgttccacggcgcgcaaatgttgggtgagccagtggcagatgttcaactagcaacgccgggcgtcgtgcgcggcaagaaaggcgaagttagtttcggggatattgcccataaaggcgaaaccggcaccggctttggttcactggtgggaactggcagttatatcacgcctgatttcgccttcccgtatggcgcaaacttcgctgaagttgccgtcaacacgcgtacgggtgaaatccgcctggataaattctacgccttgctggactgcggtacaccggtcaatccagagttagcgttgggacaaatctacggtgctaccctgcgagctatcggccacagtatgagcgaagagatcatttatgacgccgaaggtcacccgttaacgcgtgatttacgcagctacggcgcaccgaaaattggtgacattccgcgtgatttccgcgcagtgctggtgccgagcgacgataaagtcggcccgttcggggcgaaatcgatctcggaaatcggtgtaaatggcgcagctccggcgattgctaccgcaattcacgatgcatgcggcatctggttacgcgaatggcatttcacaccggagaaaatactcaccgcgctggaaaagatataa

SEQ ID NO: 51 - protein, 613 aa, Escherichia coli
MNMLALTIILPLIGFVLLAFSRGRWSENVSAIVGVGSVGLAALVTAFIGVDFFANGEQAYSQPLWTWMSVGDFNIGFNLVLDGLSLTMLSVVTGVGFLIHMYASWYMRGEEGYSRFFAYTNLFIASMVVLVLADNLLLMYLGWEGVGLCSYLLIGFYYTDPKNGAAAMKAFVVTRVGDVFLAFALFILYNELGTLNFREMVELAPAHFADGNNMLMWATLMLLGGAVGKSAQLPLQTWLADAMAGPTPVSALIHAATMVTAGVYLIARTHGLFLMTPEVLHLVGIVGAVTLLLAGFAALVQTDIKRVLAYSTMSQIGYMFLALGVQAWDAAIFHLMTHAFFKALLFLASGSVILACHHEQNIFKMGGLRKSIPLVYLCFLVGGAALSALPLVTAGFFSKDEILAGAMANGHINLMVAGLVGAFMTSLYTFRMIFIVFHGKEQIHAHAVKGVTHSLPLIVLLILSTFVGALIVPPLQGVLPQTTELAHGSMLTLEITSGVVAVVGILLAAWLWLGKRTLVTSIANSAPGRLLGTWWYNAWGFDWLYDKVFVKPFLGIAWLLKRDPLNSMMNIPAVLSRFAGKGLLLSENGYLRWYVASMSIGAVVVLALLMVLR

SEQ ID NO: 52 - DNA, 1842 bp, Escherichia coli
atgaacatgcttgccttaaccattattttgccattgattggcttcgtcctgctggcgttctcccgtgggcgctggtctgaaaacgtctcggcgatcgtcggcgttggctctgtgggcctggcggcgctggtaactgcctttattggcgttgacttcttcgctaacggcgagcaggcatacagccagccgctgtggacgtggatgtcggtaggcgactttaacatcggttttaacctggtgctggacggcctgtcgctgaccatgctctcggtggtcactggtgtgggtttccttattcacatgtacgcctcctggtatatgcgcggtgaagagggctactctcgcttcttcgcttacaccaacctgtttatcgccagcatggtggttctggtgcttgccgacaacctgctgctgatgtacctcggctgggaaggcgtgggcctgtgctcctatctgctgatcgggttctattacaccgatccgaagaatggcgcagcggcaatgaaagcgttcgtcgtgacccgtgtgggtgacgtgttcctcgctttcgcgctgttcattctttacaacgaactgggcaccctgaacttccgcgaaatggtggaactggcaccagcgcactttgctgacggcaataacatgctgatgtgggcgacgctgatgctgctgggcggtgcggtcggtaaatctgcgcagttgccgttgcagacatggcttgccgacgcgatggcgggcccgacgcctgtctccgcgctgatccacgccgcaacgatggtaaccgcgggtgtctacctgatcgcccgtacccacggcctgttcctgatgacgccggaagttctgcatctggtgggcattgttggggcggttacgctgctgctggccggttttgccgcgctggtacagaccgacatcaaacgtgttctcgcttactctaccatgagccagattggctacatgttcctcgcgcttggcgtgcaggcatgggatgcggcgatttttcacttgatgacccacgcgttctttaaagcgctgctgttcctggcatccggttccgtcattctcgcctgccatcacgaacagaacatcttcaagatgggcggtctgcgtaaatctattccgctggtttatctctgcttcctggtgggcggcgcagcactgtcggcactgccgctagtcactgcgggcttcttcagtaaggatgagatcctcgcgggtgcgatggcgaatggtcatatcaatctgatggtggcaggtctggtcggtgcgtttatgacctcgctctacaccttccgtatgattttcatcgtcttccacggaaaagaacaaattcacgctcacgccgtgaaaggggtaactcacagcctgccgctgattgtgctgctgatcctttccaccttcgttggcgcactgattgtaccgccgctgcagggcgtgcttccgcaaacgacggaactggcgcacggcagcatgttgaccctggaaattacctctggcgtggtcgcggtggtcggcattctgctggcagcctggctgtggctgggtaaacgtactctggtgacctccatcgccaacagtgcgccgggccgtctgctgggcacctggtggtacaacgcctggggctttgactggctgtacgacaaagtgttcgtcaagccgttcctgggtattgcctggttgctgaaacgcgatccgctgaactcaatgatgaacatcccggctgtcctttcccgctttgcaggtaaaggcctgctgttaagcgagaacggttatctgcgctggtatgtggcatccatgagcatcggtgcggtcgtggtgctggcactgttgatggtactgcgttga

SEQ ID NO: 53 - protein, 164 aa, Escherichia coli
MRILVLGVGNILLTDEAIGVRIVEALEQRYILPDYVEILDGGTAGMELLGDMANRDHLIIADAIVSKKSAPGTMMILRDEEVPALFTNKISPHQLGLADVLSALRFTGEFPKKLTLVGVIPESLEPHIGLTPTVEAMIEPALEQVLAALRESGVEAIPREAIHD

SEQ ID NO: 54 - DNA, 495 bp, Escherichia coli
atgcgtattttagtcttaggggtcggcaatattttgctgaccgatgaagccatcggtgtgcggattgtcgaagcgttagagcaacgatacattctgccggattatgttgagatcctcgatggcggcacggcgggaatggagctgcttggcgacatggcaaatcgcgatcatctgattattgcggatgccattgtgtcgaagaagagcgcgccgggaacgatgatgatcctgcgggatgaagaagttccggcgttgtttaccaacaaaatctctccgcatcagcttggcctggccgacgtcttgtcggccctgcgcttcaccggcgagtttccgaaaaagctgaccctggtcggcgtaattccggaatcgctggagccacacatcggcttaacgccgacggttgaagcaatgattgaacctgcgcttgagcaggttctggctgcgctgcgtgaatctggcgtggaagccatcccacgggaggcgattcatgactga

SEQ ID NO: 55 - protein, 509 aa, Escherichia coli
MLLPWLILIPFIGGFLCWQTERFGVKVPRWIALITMGLTLALSLQLWLQGGYSLTQSAGIPQWQSEFDMPWIPRFGISIHLAIDGLSLLMVVLTGLLGVLAVLCSWKEIEKYQGFFHLNLMWILGGVIGVFLAIDMFLFFFFWEMMLVPMYFLIALWGHKASDGKTRITAATKFFIYTQASGLVMLIAILALVFVHYNATGVWTFNYEELLNTPMSSGVEYLLMLGFFIAFAVKMPVVPLHGWLPDAHSQAPTAGSVDLAGILLKTAAYGLLRFSLPLFPNASAEFAPIAMWLGVIGIFYGAWMAFAQTDIKRLIAYTSVSHMGFVLIAIYTGSQLAYQGAVIQMIAHGLSAAGLFILCGQLYERIHTRDMRMMGGLWSKMKWLPALSLFFAVATLGMPGTGNFVGEFMILFGSFQVVPVITVISTFGLVFASVYSLAMLHRAYFGKAKSQIASQELPGMSLRELFMILLLVVLLVLLGFYPQPILDTSHSAIGNIQQWFVNSVTTTRP

SEQ ID NO: 56 - DNA, 1530 bp, Escherichia coli
atgttattaccctggttaatactaatcccctttatcggcggcttcctgtgctggcagaccgaacgctttggcgtcaaggtgccgcgctggatcgcgctgatcaccatgggattgacgctggcgctgtcgctgcaactgtggttgcagggcggttattcactgacgcaatccgccggaattccgcagtggcagtctgaattcgacatgccgtggatcccgcgttttggtatctctatccatctcgccattgacgggctgtcgctgctgatggtcgtgctgaccggtctgctcggtgtgctggcggtactctgttcgtggaaagagatcgaaaaatatcagggcttcttccacctcaacctgatgtggatcctgggcggcgttatcggcgtgttccttgccatcgacatgttcctgttcttcttcttctgggaaatgatgctggtgccgatgtacttcctgatcgcactgtgggggcataaagcctctgatggtaaaacgcgtatcacggcggcaaccaagttcttcatttacacccaggcgagtggtctggtgatgttgatcgccatcctggcgctggtttttgttcactacaatgcgaccggcgtctggaccttcaactatgaagagctgctgaatacgccaatgtccagtggtgtggaatatctgttgatgctgggcttcttcatcgcgtttgcggtgaaaatgccggtggttccgctgcatggctggctgccggatgcgcactcacaggcaccgaccgccggttccgtggacctcgcggggatcttgctgaaaaccgccgcttacggtctgctgcgtttctccctaccgctgttcccaaacgcgtcggcagagttcgcgccaatcgccatgtggctgggtgttatcggcatcttctacggtgcgtggatggccttcgcccagaccgatatcaaacgtctgatcgcctacacctcggtttcccacatgggcttcgtactgattgctatctacaccggcagccagttggcctaccagggcgcggtaatccagatgattgcgcacggcttgtcagcggcgggtctgtttattctttgtggtcagctttatgaacgtatccatacccgcgacatgcgcatgatgggcggtctgtggagcaagatgaaatggctgccagccttgtcactgttctttgcggtggcaacgctcgggatgccaggcaccggtaacttcgtcggcgaatttatgattctgttcggcagcttccaggttgtcccggtgattaccgttatctctacctttgggctggtctttgcatctgtttattcgctggcgatgttacatcgcgcttacttcggtaaagcgaaaagccagattgccagccaggaactgccagggatgtcgctgcgtgagctgtttatgatcctgttgctggtggtgctgctggtactgctgggcttctatccgcagccgattctggatacctcgcactccgcgattggcaatatccagcagtggtttgttaattccgttactactacaaggccgtaa

SEQ ID NO: 57 - protein, 392 aa, Escherichia coli
MQLRKLLLPGLLSVTLLSGCSLFNSEEDVVKMSPLPTVENQFTPTTAWSTSVGSGIGNFYSNLHPALADNVVYAADRAGLVKALNADDGKEIWSVSLAEKDGWFSKEPALLSGGVTVSGGHVYIGSEKAQVYALNTSDGTVAWQTKVAGEALSRPVVSDGLVLIHTSNGQLQALNEADGAVKWTVNLDMPSLSLRGESAPATAFGAAVVGGDNGRVSAVLMEQGQMIWQQRISQATGSTEIDRLSDVDTTPAVVNGVVFALAYNGNLTALDLRSGQIMWKRELGSVNDFIVDGNRIYLVDQNDRVMALTIDGGVTLWTQSDLLHRLLTSPVLYNGNLVVGDSEGYLHWINVEDGRFVAQQKVDSSGFQTEPVAADGKLLIQAKDGTVYSITR

SEQ ID NO: 58 - DNA, 1179 bp, Escherichia coli
atgcaattgcgtaaattactgctgccaggactgctttccgttacccttttaagcggctgttcgctgtttaacagcgaagaagatgtggtaaagatgtccccattgccaaccgttgaaaaccagtttacgccgaccacggcgtggagcacttccgttggtagcggcattggcaacttctattccaatcttcatccggcactggcggacaacgttgtctatgcagcggaccgcgctggtttagtaaaagcgctgaatgcggatgatggcaaagaaatctggtctgtcagcctggccgagaaagatggctggttctctaaagagcctgcattactttctggcggtgtgaccgtgtctggtggacatgtctacattggcagcgaaaaggcgcaggtttacgcgctgaataccagcgatggtactgtggcatggcaaactaaagtcgcgggtgaagcactttcgcgcccggtggtcagcgacggtctggtgttaatccacaccagtaacggtcagttacaagcgctgaacgaagctgacggcgctgtcaaatggacagttaacctcgatatgccttcgctctctttgcgtggcgagtctgcgccggcaacggcttttggtgcggccgtcgtggggggcgataatggtcgcgtcagcgcagtgctgatggaacagggccagatgatttggcagcagcgtatttcccaagcgaccggttctaccgaaattgaccgtctgagcgatgttgacacgactcccgccgttgttaacggcgttgttttcgcgctggcctataatggtaacctgacggcgcttgatctgcgcagtggtcagattatgtggaaacgcgaactgggttcggtgaatgatttcatcgtcgacggcaatcgcatctatctggtcgatcaaaatgaccgggtgatggcgttgaccattgatggcggcgttacgctgtggacacaaagcgatctgctgcatcgcctgctgacttctccggtgctgtataatggcaacctggtggtcggtgacagtgaaggttatttgcactggattaacgtcgaagatggtcgtttcgttgcccagcaaaaagttgatagttccggtttccagactgaaccggttgccgctgacggcaaactgctgatccaggcaaaagacggaaccgtgtactctattacacgttaa

SEQ ID NO: 59 - protein, 372 aa, Escherichia coli
MKYDLIIIGSGSVGAAAGYYATRAGLNVLMTDAHMPPHQHGSHHGDTRLIRHAYGEGEKYVPLVLRAQTLWDDLSRHNEDDPIFVRSGVINLGPADSAFLANVAHSAEQWQLNVEKLDAQGIMARWPEIRVPDNYIGLFETDSGFLRSELAIKTWIQLAKEAGCAQLFNCPVTAIRHDDDGVTIETADGEYQAKKAIVCAGTWVKDLLPELPVQPVRKVFAWYQADGRYSVKNKFPAFTGELPNGDQYYGFPAENDALKIGKHNGGQVIHSADERVPFAEVVSDGSEAFPFLRNVLPGIGCCLYGAACTYDNSPDEDFIIDTLPGHDNTLLITGLSGHGFKFASVLGEIAADFAQDKKSDFDLTPFSLSRFQ

SEQ ID NO: 60 - DNA, 1119 bp, Escherichia coli
atgaaatacgatctcatcattattggcagcggttccgtaggcgctgccgccgggtattatgcaacccgcgccggtttaaacgtgcttatgaccgacgcccatatgccaccacatcaacacggcagccaccacggcgatacgcgattaattcgacatgcttatggtgaaggcgaaaagtatgtcccgctggtcctccgcgcacaaacgctgtgggatgacctctcccgccacaacgaagatgatcccatttttgtacgctctggtgtcattaaccttggcccggctgactccgcatttctcgccaacgtcgcccacagcgccgaacagtggcaactcaacgttgaaaagctcgatgcgcaagggattatggcccgctggccagaaatacgcgtcccggacaactacatcggcttatttgagactgattccggttttttgcgcagcgaactggcgattaaaacctggatccaactggcgaaggaagcgggctgtgcgcaactgttcaactgcccggtcaccgcaattcgtcatgacgatgatggcgtaactattgaaacggctgacggtgagtatcaggcgaaaaaagcgattgtctgcgcgggaacatgggtaaaagacctgctcccggagctgcctgtccagcccgtacgtaaagtatttgcctggtatcaggccgatggccgctatagcgtgaagaataaattcccggcgtttaccggtgaactgcccaatggcgatcaatattatggttttccggcagaaaacgacgcgttgaagattggcaaacataacggaggccaggttatccattcagcggatgaacgtgttccgtttgcggaagtggtcagcgatggttcggaagccttcccgttcttgcgcaatgtattgccgggtatcggttgctgcctgtacggcgctgcctgcacctatgataattcgcctgacgaagattttattatcgataccctacccggccacgataatacactgctcattaccggcctgagtgggcacggttttaaatttgcgtcagttttaggggaaatagctgccgattttgcgcaagacaaaaaaagcgattttgatttgacgccattcagcctttcccgcttccaataa

SEQ ID NO: 61 - protein, 388 aa, Escherichia coli
MKITISGTGYVGLSNGLLIAQNHEVVALDILPSRVAMLNDRISPIVDKEIQQFLQSDKIHFNATLDKNEAYRDADYVIIATPTDYDPKTNYFNTSSVESVIKDVVEINPYAVMVIKSTVPVGFTEAMHKKYRTENIIFSPEFLREGKALYDNLHPSRIVIGERSERAERFAALLQEGAIKQNIPTLFTDSTEAEAIKLFANTYLAMRVAYFNELDSYAESLGLNSRQIIEGVCLDPRIGNHYNNPSFGYGGYCLPKDTKQLLANYQSVPNNLISAIVDANRTRKDFIADAILSRKPQVVGIYRLIMKSGSDNFRASSIQGIMKRIKAKGVEVIIYEPVMKEDSFFNSRLERDLATFKQQADVIISNRMAEELRDVADKVYTRDLFGSD

SEQ ID NO: 62 - DNA, 1167 bp, Escherichia coli
atgaaaatcaccatttccggtactggctatgtaggcttgtcaaacgggcttctaatcgctcaaaatcatgaggttgtggcattagatattttaccgtcacgcgttgctatgctgaatgatcggatatctcctattgttgataaggaaattcagcagtttttgcaatcagataaaatacactttaatgccacattagataaaaatgaagcctaccgggatgctgattatgtcatcatcgccactccaaccgactatgatcctaaaactaattatttcaatacatccagtgtagaatcagtaattaaagacgtagttgagataaatccttatgcggttatggtcatcaaatcaacggttcccgttggttttaccgaagcgatgcataagaaatatcgtactgaaaatattattttctctccggaatttctccgcgaaggtaaagctctttacgataaccttcatccgtcacgtattgtaatcggtgagcgttcggaacgcgcagaacgttttgctgcgttattacaggaaggcgcgattaagcaaaatatcccaaccctgtttaccgactccactgaagcagaagcgattaaactttttgcaaacacctacctcgcgatgcgcgtggcgtactttaacgaactggatagctacgcagaaagtttaggtctgaattcccgtcaaataatcgaaggcgtttgtctcgacccacgtattggcaaccattacaacaatccgtcgtttggttatggtggttattgtttgccgaaagataccaagcagttactggcgaactaccagtctgtgccgaataacctgatctcggcaattgtcgatgctaaccgcacgcgtaaagattttattgccgatgccattttgtcacgcaagccgcaagtggtaggtatttatcgtctgattatgaagagcggttcagataacttccgtgcgtcttctattcaggggattatgaagcgtatcaaggcgaaaggtgttgaagtaatcatctacgagccagtgatgaaagaagactcattcttcaactctcgcctggaacgtgatctcgccaccttcaaacaacaagccgacgtcattatttccaaccgtatggcagaagagcttagggatgtggcagataaggtctacacccgcgatctctttggcagcgactaa

SEQ ID NO: 63 - protein, 363 aa, Escherichia coli
MRFLRRPISLRQRLILTIGAILLVFELISVFWLWHESTEQIQLFEQALRDNRNNDRHIMREIREAVASLIVPGVFMVSLTLFICYQAVRRITRPLAELQKELEARTADNLTPIAIHSATLEIEAVVSALNDLVSRLTSTLDNERLFTADVAHELRTPLAGVRLHLELLAKTHHIDVAPLVARLDQMMESVSQLLQLARAGQSFSSGNYQHVKLLEDVILPSYDELSTMLDQRQQTLLLPESAADITVQGDATLLRMLLRNLVENAHRYSPQGSNIMIKLQEDGGAVMAVEDEGPGIDESKCGELSKAFVRMDSRYGGIGLGLSIVSRITQLHHGQFFLQNRQETSGTRAWVRLKKDQNVANQI

SEQ ID NO: 64 - DNA, 1092 bp, Escherichia coli
atgcgttttctgcgccgaccaatatcgctgcgccaacggctgatattgaccatcggggccattttgttggtgtttgagctgatcagcgtcttctggctatggcatgaaagtaccgagcagattcagctgtttgagcaggcgctacgcgacaatcgcaacaacgatcgccacatcatgcgtgagatccgcgaggcggtcgccagcctgattgtccccggcgtctttatggtcagcctgacgctatttatctgctatcaggcggtacgccgcatcacccgcccgctggcggagctgcaaaaagagctggaagcgcgcaccgccgacaacttaacgcccattgccattcacagcgccaccctcgaaatcgaagcggtggtttcggcgttgaacgatctggtcagtcgcctgaccagcacgctggataacgaaaggttatttaccgctgacgtcgcgcacgaactgcgaacgccactggcgggggtgcgtttgcatctggaactgctggcgaaaacgcatcacattgatgtagcaccgttagtggcacggcttgatcagatgatggagagcgtctcccagctgctgcaactggcgcgtgccggacagtcattttcttccggtaattatcaacatgtaaaactgctggaagatgtcattctcccctcgtatgacgaactcagtaccatgctcgaccagcgacagcaaaccctgctattgccagagagcgccgccgacatcaccgttcagggtgatgcaaccctgctgcggatgttattgcgaaacctggtagaaaacgcccatcgttacagcccgcaaggcagcaacattatgattaagctgcaagaagatggcggagcggtcatggccgttgaagatgaaggaccgggtattgatgagagtaaatgcggggagttgagtaaagcgtttgtacgtatggacagccgttatggcgggattggtctggggttaagtattgtcagccgcattacacagttgcatcacgggcagtttttcctgcaaaaccggcaagagacttccggcacgcgggcctgggtacggctgaagaaagatcagaacgtggcaaaccagatataa

SEQ ID NO: 65 - protein, 371 aa, Escherichia coli
MHRQFFFLVPLICLSSALWAAPATVNVEVLQDKLDHPWALAFLPDNHGMLITLRGGELRHWQAGKGLSAPLSGVPDVWAHGQGGLLDVVLAPDFAQSRRIWLSYSEVGDDGKAGTAVGYGRLSDDLSKVTDFRTVFRQMPKLSTGNHFGGRLVFDGKGYLFIALGENNQRPTAQDLDKLQGKLVRLTDQGEIPDDNPFIKESGARAEIWSYGIRNPQGMAMNPWSNALWLNEHGPRGGDEINIPQKGKNYGWPLATWGINYSGFKIPEAKGEIVAGTEQPVFYWKDSPAVSGMAFYNSDKFPQWQQKLFIGALKDKDVIVMSVNGDKVTEDGRILTDRGQRIRDVRTGPDGYLYVLTDESSGELLKVSPRN

SEQ ID NO: 66 - DNA, 1116 bp, Escherichia coli
atgcatcgacaattctttttccttgtgccccttatttgtctttcttccgctctctgggcggctcctgcaacggtaaatgtcgaagtactgcaagacaaactcgaccatccctgggcactggcctttttacccgataaccacggtatgttaatcactctgcgcggcggcgagttgcgtcactggcaagcaggaaaaggattatctgcgccgctttccggagttccggacgtttgggcgcacgggcagggcggcctgctggacgtggttttagcgcctgattttgctcagtctcgccgcatctggttaagttattccgaagttggcgatgatggcaaagccggaactgctgtggggtatggccgcttaagtgatgatctctcaaaagtgaccgactttcgcaccgtctttcgccagatgccaaaactgtctaccggcaaccattttggcgggcggctggtattcgacggtaaaggttatctttttattgctctgggcgaaaacaatcagcgcccgacggcgcaggatctggataaattacagggcaaactggtgcgtctgaccgaccagggcgaaatcccggatgataatccttttataaaggaatccggtgcgcgcgccgagatctggtcttatggcattcgtaatccgcaaggaatggcgatgaatccgtggagtaatgcactgtggctgaatgaacatggcccgcgcggtggtgatgaaattaatatcccgcaaaaaggcaaaaactacggctggccgctggcaacctggggaatcaactattcaggctttaagataccggaagcgaaaggggagatcgtcgccgggaccgagcaacctgttttttactggaaagattcgcccgccgtgagcggcatggccttctataacagcgataaattcccccagtggcagcaaaaattatttattggcgcgctgaaagataaagatgtcattgtgatgagcgtcaacggcgacaaagtaacagaagatggccgtattttaacggacagagggcagcgaattcgtgatgttcgcactggacccgacggttatttatacgttctcaccgacgagtccagtggggaattacttaaagttagcccacgcaattag

SEQ ID NO: 67 - protein, 417 aa, Escherichia coli
MCEHHHAAKHILCSQCDMLVALPRLEHGQKAACPRCGTTLTVAWDAPRQRPTAYALAALFMLLLSNLFPFVNMNVAGVTSEITLLEIPGVLFSEDYASLGTFFLLFVQLVPAFCLITILLLVNRAELPVRLKEQLARVLFQLKTWGMAEIFLAGVLVSFVKLMAYGSIGVGSSFLPWCLFCVLQLRAFQCVDRRWLWDDIAPMPELRQPLKPGVTGIRQGLRSCSCCTAILPADEPVCPRCGTKGYVRRRNSLQWTLALLVTSIMLYLPANILPIMVTDLLGSKMPSTILAGVILLWSEGSYPVAAVIFLASIMVPTLKMIAIAWLCWDAKGHGKRDSERMHLIYEVVEFVGRWSMIDVFVIAVLSALVRMGGLMSIYPAMGALMFALVVIMTMFSAMTFDPRLSWDRQPESEHEES

SEQ ID NO: 68 - DNA, 1254 bp, Escherichia coli
atgtgcgaacatcatcatgccgcgaagcacatcctgtgctcgcagtgtgacatgctggtggcgttaccgcgccttgagcatggtcagaaagcggcatgtccccggtgtggcacaacgttaaccgtggcgtgggatgccccccggcagcgtccgaccgcctatgcgttggctgcactgttcatgctgttgctgtccaacttgtttccttttgtgaatatgaacgttgcaggagttaccagtgaaattacattactggaaattcccggcgtgcttttttctgaggactacgccagcctcggcacctttttcctgttgtttgtgcaactggttcccgcgttttgtctgataaccattctgttactggtgaatcgcgcggaattaccggtccgtttaaaagagcaactggcacgggtgctttttcaactcaaaacctggggaatggcggagattttcctcgcgggtgtgctggtcagtttcgttaaactgatggcttacggcagcattggcgtaggcagcagctttctcccctggtgtttattttgtgtcctgcaactgcgcgcttttcagtgcgttgatcgtcgctggttatgggacgatatcgccccgatgccagaactgcgccagccgctaaaaccaggcgtcacggggatacgtcaggggctgcgttcgtgctcctgttgtacggcaatccttcctgctgatgaacccgtgtgcccgcgctgtggtactaaagggtacgttcgacgtagaaacagcctgcaatggacactcgcgctgcttgttacgtccatcatgctgtatcttccggctaatattttgcccatcatggtgacggatttattaggctcgaagatgccatcgacgattctcgctggggtcatcctgttatggagcgaaggctcttatcccgtcgctgcggtgatctttctggccagtattatggtgccaacgttaaagatgatcgccatcgcgtggctgtgttgggatgccaaagggcatggcaagcgcgacagtgaaagaatgcatttgatttatgaagttgttgagtttgtaggccgctggtcgatgattgacgttttcgttatcgcggtgctctcggcgctggtgcgtatgggaggtttaatgagtatttatccggcaatgggtgcattaatgtttgctttagtcgtcataatgacaatgttttctgctatgacgtttgacccgcgtttgtcgtgggatcgtcaacctgaatcagagcatgaggagtcctga

SEQ ID NO: 69 - protein, 134 aa, Escherichia coli
MRALPICLVALMLSGCSMLSRSPVEPVQSTAPQPKAEPAKPKAPRATPVRIYTNAEELVGKPFRDLGEVSGDSCQASNQDSPPSIPTARKRMQINASKMKANAVLLHSCEVTSGTPGCYRQALCIGSALNITAK

SEQ ID NO: 70 - DNA, 405 bp, Escherichia coli
atgcgtgctttaccgatctgtttagtagcactcatgctaagcggctgttccatgttaagcagatcccctgtcgaacccgttcaaagcactgcaccccagccgaaagcggagcctgcaaaaccgaaagcgccgcgcgccacgccggtccgaatttataccaatgcagaagaattagtcggcaaaccgttccgcgatctcggtgaagtcagtggcgactcttgccaggcctctaatcaggactctccgccgagcattccaaccgcgcgtaagcggatgcaaatcaacgcctcgaaaatgaaagccaatgcggtattactgcatagctgcgaagttaccagcggtacgccaggctgctatcgtcaggctttatgtatcggttctgcgcttaacattacggcgaaatga

SEQ ID NO: 71 - protein, 349 aa, Escherichia coli
MATGTQPDAGQILNSLINSILLIDDNLAIHYANPAAQQLLAQSSRKLFGTPLPELLSYFSLNIELMQESLEAGQGFTDNEVTLVIDGRSHILSVTAQRMPDGMILLEMAPMDNQRRLSQEQLQHAQQVAARDLVRGLAHEIKNPLGGLRGAAQLLSKALPDPSLLEYTKVIIEQADRLRNLVDRLLGPQLPGTRVTESIHKVAERVVTLVSMELPDNVRLIRDYDPSLPELAHDPDQIEQVLLNIVRNALQALGPEGGEIILRTRTAFQLTLHGERYRLAARIDVEDNGPGIPPHLQDTLFYPMVSGREGGTGLGLSIARNLIDQHSGKIEFTSWPGHTEFSVYLPIRK

SEQ ID NO: 72 - DNA, 1050 bp, Escherichia coli
atggcaacaggcacgcagcccgatgctgggcagatcctcaactcgctgattaacagtattttgttaatcgatgacaacctggcgatccattacgccaaccccgccgcgcaacaactgctcgcccaaagctcccgcaaattgtttggtacgccgttaccggaactgttgagctacttctcattaaatattgagctgatgcaagaaagtctggaggcggggcaaggttttaccgataacgaagtgacgctggtcatcgacggtcgctcgcatatcctttctgtgacggcccagcgtatgccggacggcatgatcctgctggagatggcgccgatggataaccagcgccgcttaagccaggaacagctacaacatgctcaacaagttgctgcccgtgatttagtgcgtggcctggcacatgagattaaaaatccgcttggcggtttacgtggcgcggcgcagctactcagcaaagcattacctgacccgtcactgctggaatataccaaagtgattatcgaacaggcggaccggctgcgaaatctggtcgaccgtctgttggggccgcagctgcccggtacgcgcgttaccgaaagtattcacaaagtagctgaacgcgtggtaacgctggtgtcgatggaactgccggacaacgtgcggttgattcgtgattacgatcccagcctgccggaactggcgcacgacccggatcaaattgaacaggtcttgctgaatattgtgcgcaatgcgctacaggcgctggggccggaaggcggtgaaatcattctgcgtacccgcaccgcgtttcaactgaccttacacggcgaacgctatcggctggcggcgcggattgatgtggaagataacgggccaggcattccgcctcatttgcaggatacgctgttttacccgatggtcagcggccgcgaaggtggcaccgggcttggcttatccatcgctcgtaatttgattgatcagcattcaggcaaaattgaatttaccagttggccagggcataccgagttctcggtttacctgcctatcaggaaataa

SEQ ID NO: 73 - protein, 458 aa, Escherichia coli
  misc_feature (376)..(376): Xaa can be any naturally occurring amino acid
MRFMQRSKDSLAKWLSAILPVVIVGLVGLFAVTVIRDYGRETAAARQTLLEKGSVLIRALESGSRVGMGMRMHHAQQQALLEEMAGQPGVRWFAVTDEQGTIVMHSNSGMVGKQLYSPQEMQQLHPGDEEVWRRIDSADGEPVLEIYRQFQPMFAAGMHRMRHMQQYAATPQAIFIAFDASNIVSAEDREQRNTLIILFALATVLLASVLSFFWYRRYLRSRQLLQDEMKRKEKLVALGHLAAGVAHEIRNPLSSIKGLAKYFAERAPAGGEAHQLAQVMAKEADRLNRVVSELLELVKPTHLALQAVDLNTLINHSLQLVSQDANCREIQLRFTANDTLPEIQADPDRLTQVLLNLYLNAIQAIGQHGVISVTAXZSGAGVKISVTDSGKGIAADQLEAIFTPYFTTKAEGTGLGLAVVHNIVEQHGGTIQVASLEGKGARFTLWLPVNITRKDPQG

SEQ ID NO: 74 - DNA, 1377 bp, Escherichia coli
atgcgttttatgcaacgttctaaagactccttagctaaatggttaagcgcgatcctccccgtggtcattgttgggctggtagggttgtttgcggtgacggtgattcgcgattatggccgcgagactgccgccgccagacaaacgctgctggaaaaaggcagtgtacttattcgtgctctcgaatccggctcgcgcgtcggcatggggatgcgcatgcatcatgcgcagcagcaggccttactggaagaaatggccgggcagcctggagtacgttggtttgcggtcacggatgaacaaggaacaatcgtgatgcatagcaactccggcatggtgggaaaacagctttattccccgcaggaaatgcagcagttacatccgggagatgaagaagtgtggcggcggatcgatagcgcagacggcgagcctgttctggaaatttatcgccagtttcaaccgatgtttgctgctggaatgcaccggatgcgccatatgcagcagtatgccgcgacaccacaagcaattttcatcgctttcgacgccagtaatattgtgagtgccgaagatcgtgagcagagaaacaccctgattatcctcttcgccctggcgacggtcttgctggcaagcgtattgtcattcttctggtatcgccgctatctgcgctcgcgccagcttctacaagatgaaatgaagcgcaaagagaagctggtggcgctggggcatcttgcggcaggcgttgcccacgaaattcgtaacccgctttcctcgattaaagggctggcaaaatactttgccgagcgcgcgccagcagggggagaagcgcatcaactggcgcaggtgatggcgaaagaagctgaccgtttaaaccgcgtggtaagcgagctgctggaactggttaagccaacgcatctggctttgcaggcggtggatctcaacacgctgattaaccactcattacagctggtaagccaggatgcaaactgccgggagatccagttacgctttaccgccaacgacacgttgccggaaattcaggccgatccggacaggctgactcaggtcctgttgaatctttatctcaatgctattcaggcgattggtcagcatggcgtgattagcgtgacggccakcsaaagcggcgcgggcgtgaaaatcagcgttaccgacagcggtaagggaattgcggcagatcagcttgaagccatcttcaccccgtacttcaccaccaaagccgaaggcaccggactggggctggcggtcgtgcataatattgttgaacaacacggtggtacaattcaggtcgcaagcctggagggaaaaggcgcaaggttcaccctctggcttccggtcaatattacgcgtaaggacccacaaggatga

SEQ ID NO: 75 - protein, 598 aa, Escherichia coli
MLKRCLSPLTLVNQVALIVLLSTAIGLAGMAVSGWLVQGVQGSAHAINKAGSLRMQSYRLLAAVPLSEKDKPLIKEMEQTAFSAELTRAAERDGQLAQLQGLQDYWRNELIPALMRAQNRETVSADVSQFVAGLDQLVSGFDRTTEMRIETVVLVHRVMAVFMALLLVFTIIWLRARLLQPWRQLLAMASAVSHRDFTQRANISGRNEMAMLGTALNNMSAELAESYAVLEQRVQEKTAGLEHKNQILSFLWQANRRLHSRAPLCERLSPVLNGLQNLTLLRDIELRVYDTDDEENHQEFTCQPDMTCDDKGCQLCPRGVLPVGDRGTTLKWRLADSHTQYGILLATLPQGRHLSHDQQQLVDTLVEQLTATLALDRHQERQQQLIVMEERATIARELHDSIAQSLSCMKMQVSCLQMQGDALPESSRELLSQIRNELNASWAQLRELLTTFRLQLTEPGLRPALEASCEEYSAKFGFPVKLDYQLPPRLVPSHQAIHLLQIAREALSNALKHSQASEVVVTVAQNDNQVKLTVQDNGCGVPENAIRSNHYGMIIMRDRAQSLRGDCRVRRRESGGTEVVVTFIPEKTFTDVQGDTHE

SEQ ID NO: 76 - DNA, 1797 bp, Escherichia coli
atgcttaaacgttgtctctctccgctcaccctggttaatcaggttgcgcttattgtgttgctttctactgctattggactggcagggatggcggtttctggctggctggtgcaaggcgttcagggcagcgcccatgcgatcaacaaagcgggatcgctgcgcatgcaaagttaccgtctgttggcagcagtgccattaagcgagaaagacaagcccttaattaaagagatggaacaaacggcatttagcgccgagttgactcgagcagcagaacgagacggacaactggcgcaattacagggtttacaagattactggcgtaatgaactcatccctgcactgatgcgtgcacaaaaccgcgaaacggtgtcagcggatgtcagccagtttgttgccgggcttgatcagctggtatctggttttgaccgcaccacggaaatgcgcattgagacagtggtactggtccatcgggtaatggcggtatttatggcacttttactggtgttcactattatctggttgcgggcgcgactgctacaaccgtggcggcaactgctggcaatggcgagtgccgtcagccatcgcgattttacccaacgcgcaaacatcagcgggcgcaacgaaatggcgatgcttggaactgcgttgaacaatatgtctgcagaactggccgaaagttatgccgtacttgagcagcgggttcaggagaaaaccgccgggctggagcataaaaatcagatcctctcttttttatggcaggctaaccgccgtttgcattcccgcgccccgctgtgtgaacgcctgtcacctgtactcaacggcttacagaatttaaccctgctacgtgatatcgaactgcgggtgtatgacactgatgatgaagagaatcatcaggagtttacctgccagccagatatgacttgtgatgataaaggctgccagctctgcccgcgcggcgtattacccgttggtgatcgcggcacgaccctgaagtggcggctggctgactctcatacgcagtacggtattttgctggcgaccctaccgcaggggcgtcatcttagccatgatcaacaacaactggtggataccctggttgaacaactcaccgccacgctggcgctggatcggcatcaggaacgtcagcaacagttgatcgtgatggaagagcgtgccaccattgcgcgcgaactgcatgattctattgcccaatctctctcttgcatgaagatgcaggtgagttgtttacagatgcagggcgatgcgctgccagaaagcagccgcgaactgttaagtcagatccgtaacgaactgaatgcatcctgggcgcagttgcgtgaattgctcaccacattccgcttgcagctcaccgagcctggattacgtccggcgctggaggcgagttgcgaagagtacagcgccaaatttggcttcccggtgaagctggattatcaattgccgcctcgtctggtgccttcgcatcaggcaatccacttgttgcaaattgcccgtgaggcattaagtaacgccctcaaacattcgcaagcgagtgaggtcgtggtgacrgtggcgcaaaacgataatcaggtcaaactgaccgtccaggataacggctgcggcgtgcctgaaaatgccatccgcagcaatcactacggcatgataataatgcgcgaccgtgcgcaaagtttacgaggcgattgccgcgtccgccgtcgtgaatcaggtggcaccgaagtggtggtcacctttattcccgaaaaaactttcacagacgtccaaggagatacccatgagtaa

SEQ ID NO: 77 - protein, 485 aa, Escherichia coli
MAKNYAALARSVIAALGGVDNISAVTHCMTRLRFVIKDDALIDSPTLKTIPGVLGVVRSDNQCQVIIGNTVSQAFQEVVSLLPGDMQPALPVGKPKLTLRRIGAGILDALIGTMSPLIPAIIGGSMVKLLAMILEMSGVLTKGSPTLTILNVIGDGAFFFLPLMVAASAAIKFKTNMSLAIAIAGVLVHPSFIELMAKAAQGEHVEFALIPVTAVKYTYTVIPALVMTWCLSYIERWVDRITPAVTKNFLKPMLIVLIAAPLAILLIGPIGIWIGSAISALVYTIHGYLGWLSVAIMGALWPLLVMTGMHRVFTLTIIQTIAETGKEGMVMPSEIGANLSLGGSSLAVAWKTKNPELRQTALAAAASAIMAGISEPALYGVAIRLKRPLIASLISGFICGAVAGMAGLASHSMAAPGLFTSVQFFDPANPMSIVWVFAVMALAVVLSFILTLLLGFEDIPVEEAAAEARKHQSAQPTVAKEVSLN

SEQ ID NO: 78 - DNA, 1458 bp, Escherichia coli
atggccaaaaattatgcggcgctggcacgctcggtgatagcggcactgggcggcgttgataacatctcggcggtcacgcactgtatgacgcgtttgcgctttgttatcaaagatgatgcgcttatcgacagcccgacgttaaaaaccatccccggcgtgctcggcgtggtacgtagtgacaaccagtgtcaggtgattattggcaataccgtttcacaagcctttcaggaagtcgtcagcctgctgccgggagatatgcagcccgccctgcccgtgggtaaacccaaactcacgctgcgtcgcattggtgcggggatcctcgatgcgctgatcggcaccatgtcaccgctgatcccggcgattatcggcggatcgatggtcaaactgctggcgatgatcctcgagatgagcggcgtgctgacaaaaggatcgccgaccttaaccattctgaatgtgattggtgacggtgctttcttcttcctgccgctgatggtcgcggcttcggccgccatcaaatttaaaaccaatatgtcgctggcgattgccatcgcgggtgtgctggtacatccgagttttattgaactgatggcgaaagcggcccagggtgaacatgtcgaatttgccctgattccagtcaccgcggtgaaatacacctacacagtgatcccggcgctggtgatgacctggtgcctgtcatatatcgaacgctgggtggatcgcattacaccggcggtgaccaaaaacttcctcaagccaatgctgattgtgttgattgccgcaccgctggcaatcctgctgattggcccgattggtatctggatcggtagcgccatttcggcgctggtttacaccattcatggttatctgggctggctttcagtcgccattatgggcgcgctgtggcctctgctggtaatgaccgggatgcaccgcgtctttacgctaaccatcattcagaccattgccgaaaccggcaaagaagggatggtcatgccgtcagagatcggcgctaacctgtcgctgggcggttcatcactggcggtggcgtggaaaacgaaaaacccggaactgcgccagactgcgctggctgcggcggcatcagccattatggcggggatttccgaaccggcgttatacggcgtggcgatccgcctgaaacgtccgcttatcgccagtcttatcagcggttttatttgcggcgcggttgccggtatggcggggcttgccagccactcaatggcagcgccggggctatttaccagcgtgcagttcttcgatccggcgaatccaatgagcatcgtctgggtgttcgcggtcatggcgctggcggtggtgctgtcgtttatcctcacactgttgctcggctttgaggatattcctgttgaggaagcggctgccgaggcgcgaaagcatcagagcgcacaaccgaccgtcgccaaagaagtaagtcttaattga

SEQ ID NO: 79 - protein, 492 aa, Escherichia coli
MSLREKTISGAKWSAIATVIIIGLGLVQMTVLARIIDNHQFGLLTVSLVIIALADTLSDFGIANSIIQRKEISHLELTTLYWLNVGLGLVVCVAVFLLSDLIGDVLNNPDLAPLIKTLSLAFVVIPHGQQFRALMQKELEFNKIGMIETSAVLAGFTFTVVSAHFWPLAMTAILGYLVNSAVRTLLFGYFGRKIYRPGLHFSLASVAPNLRFGAWLTADSIINYLNTNLSTLVLARILGAGVAGGYNLAYNVAVVPPMKLNPIITRVLFPAFAKIQDDTEKLRVNFYKLLSVVGIINFPALLGLMVVSNNFVPLVFGEKWNSIIPVLQLLCVVGLLRSVGNPIGSLLMAKARVDISFKFNVFKTFLFIPAIVIGGQMAGAIGVTLGFLLVQIINTILSYFVMIKPVLGSSYRQYILSLWLPFYLSLPTLVVSYVLGIVLKGQLALGMLLAVQIAAGVLAFVVMIVLSRHPLVVEVKRQFCRSEKMKMLLRAG

SEQ ID NO: 80 - DNA, 1479 bp, Escherichia coli
atgagcttacgtgaaaaaaccatcagcggcgcgaagtggtcggcgattgccacggtgatcatcatcggcctcgggctggtgcagatgaccgtgctggcgcggattatcgacaaccaccagttcggtttgcttaccgtgtcgctggtgatcatcgcgctggcagatacgctttctgacttcggtattgctaactcgattattcagcgaaaagaaatcagccaccttgaactcaccacgctgtactggctgaacgttgggctggggcttgtggtgtgtgtggcggtgtttttgttgagtgatctcattggtgacgtgctgaacaacccggacctggcaccgttgattaaaacattgtcgctggcgtttgtggttatcccccacgggcaacagttccgcgcgttgatgcaaaaggagctggagttcaacaaaatcggcatgatcgaaaccagcgcggtactggcgggcttcacttttacggtggttagcgcccatttctggccgctggcgatgaccgcgatcctcggttatctggtcaatagtgcggtgagaacgctgctgtttggctactttggccgcaaaatttatcgccccggtctgcatttctcgctggcgtctgttgcgccgaacttacgctttggtgcctggctgacggcggacagcatcatcaactatctcaataccaacctttcaacgctggtgctggcgcgtattctcggcgcgggcgtggcagggggatacaacctggcgtacaacgtggccgttgtgccgccgatgaagctgaacccgatcatcacccgtgtgttgtttccggcattcgccaaaattcaggacgataccgaaaagctgcgcgtcaacttctacaagctgctgtcggtggtggggattatcaactttccggcgctgctcgggctgatggtggtgtcaaataactttgtaccgctggtatttggcgaaaagtggaacagcattattccggtgctgcaattgctgtgtgtggtgggtctgctgcgctccgtaggtaacccgattggttcgctgctgatggcgaaagcgcgggtcgatatcagctttaaattcaacgtattcaaaacatttctgtttattccggcgattgttattggtgggcagatggcgggcgcaatcggcgtcacgctcggtttcctgctggtgcagattatcaacaccattctgagttacttcgtgatgattaaaccggttcttggttccagttatcgccagtacatcctgagtttgtggctgccgttttatctctcgctgccgacgctggtggtcagttatgtgctgggcattgtgctgaaagggcaactggcgctggggatgctgctggcggtgcaaatagccgcgggcgtgctggcgtttgtggtgatgattgtgctgtcgcgccatccgctggtggtggaagtgaagcgccagttttgtcgcagcgaaaaaatgaaaatgcttttacgggcggggtga

SEQ ID NO: 81 - protein, 443 aa, Escherichia coli
MSTSDSIVSSQTKQSSWRKSDTTWTLGLFGTAIGAGVLFFPIRAGFGGLIPILLMLVLAYPIAFYCHRALARLCLSGSNPSGNITETVEEHFGKTGGVVITFLYFFAICPLLWIYGVTITNTFMTFWENQLGFAPLNRGFVALFLLLLMAFVIWFGKDLMVKVMSYLVWPFIASLVLISLSLIPYWNSAVIDQVDLGSLSLTGHDGILITVWLGISIMVFSFNFSPIVSSFVVSKREEYEKDFGRDFTERKCSQIISRASMLMVAVVMFFAFSCLFTLSPANMAEAKAQNIPVLSYLANHFASMTGTKTTFAITLEYAASIIALVAIFKSFFGHYLGTLEGLNGLVLKFGYKGDKTKVSLGKLNTISMIFIMGSTWVVAYANPNILDLIEAMGAPIIASLLCLLPMYAIRKAPSLAKYRGRLDNVFVTVIGLLTILNIVYKLF

SEQ ID NO: 82 - DNA, 1332 bp, Escherichia coli
atgagtacttcagatagcattgtatccagccagacaaaacaatcgtcctggcgtaaatcagataccacatggacgttaggcttgtttggtacggcaatcggcgccggggtgctgttcttccctatccgcgcaggttttggcggactgatcccgattcttctgatgttggtattggcataccccatcgcattttattgccaccgggcgctggcgcgtctgtgtctttctggctctaacccttccggcaacattacggaaacggtggaagagcattttggtaaaactggcggcgtggttatcacgttcctgtacttcttcgcgatttgcccactgctgtggatttatggcgttactattaccaatacctttatgacgttctgggaaaaccagctcggctttgcaccgctgaatcgcggctttgtggcgctgttcctgttgctgctgatggctttcgtcatctggtttggtaaggatctgatggttaaagtgatgagctacctggtatggccgtttatcgccagcctggtgctgatttctttgtcgctgatcccttactggaactctgcagttatcgaccaggttgacctcggttcgctgtcgttaaccggtcatgacggtatcctgatcactgtctggctggggatttccatcatggttttctcctttaacttctcgccaatcgtctcttccttcgtggtttctaaacgtgaagagtatgagaaagacttcggtcgcgacttcaccgaacgtaaatgttcccaaatcatttctcgtgccagcatgctgatggttgcagtggtgatgttctttgcctttagctgcctgtttacgctgtctccggccaacatggcggaagccaaagcgcagaatattccagtgctttcttatctggctaaccactttgcgtccatgaccggtaccaaaacaacgttcgcgattacactggaatatgcggcttccatcatcgcactcgtggctatcttcaaatctttcttcggtcactatctgggaacgctggaaggtctgaatggcctggtcctgaagtttggttataaaggcgacaaaactaaagtatcgctgggtaaactgaacactatcagcatgatcttcatcatgggctccacctgggttgttgcctacgccaacccgaacatcctcgacctgattgaagccatgggcgcaccgattatcgcatccctgctgtgcctgttgccgatgtatgccatccgtaaagcgccgtctctggcgaaataccgtggtcgtctggataacgtgtttgttaccgtgattggtctgctgaccatcctgaacatcgtatataaactgttttaa

SEQ ID NO: 83 - protein, 514 aa, Escherichia coli
  misc_feature (122)..(122): Xaa can be any naturally occurring amino acid
MDVIKKKHWWQSDALKWSVLGLLGLLVGYLVVLMYAQGEYLFAITTLILSSAGLYIFANRKAYAWRYVYPGMAGMGLFVLFPLVCTIAIAFTNYSSTNQLTFERAQEVLLDRSWQAGKTYNXGLYPAGDEWQLALSDGETGKNYLSDAFKFGREQKLQLKETTAQPEGERANLRVITQNRQALSDITAILPDGNKVMMSSLRQFSGTQPLYTLDGDGTLTNNQSGVKYRPNNQIGFYQSITADGNWGDEKLSPGYTVTTGWKNFTRVFTDEGIQKPFLAIFVWTVVFSLITVFLTVAVGMVLACLVQWEALRGKAVYRVLLILPYAVPSFISILIFKGLFNQSFGEINMMLSALFGVKPAWFSDPTTARTMLIIVNTWLGYPYMMILCMGLLKAIPDDLYEASAMDGAGPFQNFFKITLPLLIKPLTPLMIASFAFNFNNFVLIQLLTNGGPDRLGTTTPAGYTDLLVNYTYRIAFEGGGGQDFGLAAAIATLIFLLVGALAIVNLKATRMKFD

SEQ ID NO: 84 - DNA, 1545 bp, Escherichia coli
atggatgtcattaaaaagaaacattggtggcaaagcgacgcgctgaaatggtcagtgttaggtctgctcggcctgctggtgggttaccttgttgttttaatgtacgcacaaggggaatacctgttcgccattaccacgctgatattgagttcagcggggctgtatattttcgccaatcgtaaagcctacgcctggcgctatgtttacccgggaatggctggaatgggattattcgtcctcttccctctggtctgcaccatcgccattgccttcaccaactacagcagcactaaccagctgacttttgaacgtgcacaggaagtgttgttagatcgctcctggcaagcaggcaaaacctataactktggtctttacccggcgggcgatgagtggcaactggcgctcagcgacggcgaaaccggcaaaaattacctctccgacgcttttaaatttggcagagagcaaaaactgcaactgaaagaaacgaccgcccagcccgaaggcgaacgcgcaaatctacgcgtgattacccagaatcgtcaggcgctgagtgacattaccgccattctgccggatggcaacaaagtgatgatgagctccctgcgccagttttctggcacgcagccgctctacacactcgacggtgacggcacgttgacgaataatcagagcggcgtgaaatatcgtccgaataaccaaattggcttttaccagtccattaccgccgacggcaactggggtgatgaaaagctaagccccggttacaccgtgaccaccggctggaaaaactttactcgcgtcttcaccgacgaaggcattcagaaaccgttcctcgccattttcgtctggaccgtggtgttctcgctgatcactgtctttttaacggtggcagtcggcatggttctggcgtgtctggtgcagtgggaagcgttgcgcggcaaagcggtctatcgcgtcctgctgattctgccctacgcggtgccatcgttcatttcaatcttgattttcaaagggttgtttaaccagagcttcggtgagatcaacatgatgttgagcgcgctgtttggcgtgaagcccgcctggttcagcgatccgaccaccgcccgaacgatgctgattatcgtcaatacctggctgggctatccgtacatgatgatcctctgcatgggcttgctgaaagcgattccggacgatttgtatgaagcctcagcaatggatggcgcaggtccgttccagaacttctttaagattacgctgccgctgctgattaaaccgctgacgccgctgatgatcgccagcttcgcctttaactttaacaacttcgtgctgattcaactgttaaccaacggcggcccggatcgtcttggcacgaccacgccagccggttataccgacctgcttgttaactacacctaccgcatcgcttttgaaggcggcgggggtcaggacttcggtctggcagcagcaattgccacgctgatcttcctgctggtgggtgcgctggcgatagtgaacctgaaagccacgcgaatgaagtttgattaa

SEQ ID NO: 85 - protein, 182 aa, Escherichia coli
MITMKKSVLTAFITVVCATSSVMAADDNAITDGSVTFNGKVIAPACTLVAATKDSVVTLPDVSATKLQTNGQVSGVQTDVPIELKDCDTTVTKNATFTFNGTADTTQITAFANQASSDAATNVALQMYMNDGTTAIKPDTETGNILLQDGDQTLTFKVDYIATGKATSGNVNAVTNFHINYY

SEQ ID NO: 86 - DNA, 549 bp, Escherichia coli
atgataacgatgaaaaaaagtgtattgacggcgtttataactgtggtatgtgcaacgtccagcgttatggctgctgatgataatgctatcacggatggctcagtaacatttaatggtaaagttattgctccagcttgtaccctggtagctgcgacgaaagattccgtggtgactttgccagatgttagtgccacgaagttgcaaaccaatggtcaggtttctggcgtgcaaactgatgtgccaattgaattaaaagattgtgatactaccgtaacaaaaaatgcaacgttcacctttaatggcactgcggatactactcagattacagcgtttgctaaccaggcctcatctgatgctgctacaaacgtggccctgcaaatgtatatgaatgatggtacaacggccatcaagccagacacagaaaccgggaacattttgttgcaagatggagatcagacgttgacttttaaagttgattatatcgctacggggaaagcgacttctggtaatgtgaatgcggtaacaaatttccatattaactattattaa

SEQ ID NO: 87 - protein, 398 aa, Escherichia coli
MKQLTILGSTGSIGCSTLDVVRHNPEHFRVVALVAGKNVTRMVEQCLEFSPRYAVMDDEASAKLLKTMLQQQGSRTEVLSGQQAACDMAALEDVDQVMAAIVGAAGLLPTLAAIRAGKTILLANKESLVTCGRLFMDAVKQSKAQLLPVDSEHNAIFQSLPQPIQHNLGYADLEQNGVVSILLTGSGGPFRETPLRDLATMTPDQACRHPNWSMGRKISVDSATMMNKGLEYIEARWLFNASASQMEVLIHPQSVIHSMVRYQDGSVLAQLGEPDMRTPIAHTMAWPNRVNSGVKPLDFCKLSALTFAAPDYDRYPCLKLAMEAFEQGQAATTALNAANEITVAAFLAQQIRFTDIAALNLSVLEKMDMREPQCVDDVLSVDASAREVARKEVMRLAS

SEQ ID NO: 88 - DNA, 1197 bp, Escherichia coli
atgaagcaactcaccattctgggctcgaccggctcgattggttgcagcacgctggacgtggtgcgccataatcccgaacacttccgcgtagttgcgctggtggcaggcaaaaatgtcactcgcatggtagaacagtgcctggaattctctccccgctatgccgtaatggacgatgaagcgagtgcgaaacttcttaaaacgatgctacagcaacagggtagccgcaccgaagtcttaagtgggcaacaagccgcttgcgatatggcagcgcttgaggatgttgatcaggtgatggcagccattgttggcgctgctgggctgttacctacgcttgctgcgatccgcgcgggtaaaaccattttgctggccaataaagaatcactggttacctgcggacgtctgtttatggacgccgtaaagcagagcaaagcgcaattgttaccggtcgatagcgaacataacgccatttttcagagtttaccgcaacctatccagcataatctgggatacgctgaccttgagcaaaatggcgtggtgtccattttacttaccgggtctggtggccctttccgtgagacgccattgcgcgatttggcaacaatgacgcccgatcaagcctgccgtcatccgaactggtcgatgggacgtaaaatttctgtcgattcggctaccatgatgaacaaaggtctggaatacattgaagcgcgttggctgtttaacgccagcgccagccagatggaagtgctgattcacccgcagtcagtgattcactcaatggtgcgctatcaggacggcagtgttctggcgcagctgggggaaccggatatgcgtacgccaattgcccacaccatggcatggccgaatcgcgtgaactctggcgtgaagccgctcgatttttgcaaactaagtgcgttgacatttgccgcaccggattatgatcgttatccatgcctgaaactggcgatggaggcgttcgaacaaggccaggcagcgacgacagcattgaatgccgcaaacgaaatcaccgttgctgcttttcttgcgcaacaaatccgctttacggatatcgctgcgttgaatttatccgtactggaaaaaatggatatgcgcgaaccacaatgtgtggacgatgtgttatctgttgatgcgagcgcgcgtgaagtcgccagaaaagaggtgatgcgtctcgcaagctga

SEQ ID NO: 89 - protein, 464 aa, Escherichia coli
MVRSQLSRADAPCLLTSLRRQLMAMFGLPHWQLKSTSTESGVVAPDERLPFAQTAVMGVQHAVAMFGATVLMPILMGLDPNLSILMSGIGTLLFFFITGGRVPSYLGSSAAFVGVVIAATGFNGQGINPNISIALGGIIACGLVYTVIGLVVMKIGTRWIERLMPPVVTGAVVMAIGLNLAPIAVKSVSASGFDSWMAVMTVLCIGLVAVFTRGMIQRLLILVGLIVACLLYGVMTNVLGLGKAVDFTLVSHAAWFGLPHFSTPAFNGQAMMLIAPVAVILVAENLGHLKAVAGMTGRNMDPYMGRAFVGDGLATMLSGSVGSSGVTTYAENIGVMAVTKVYSTLVFVAAAVIAMLLGFSPKFGALIHTIPAAVIGGASIVVFGLIAVAGARIWVQNRVDLSQNGNLIMVAVTLVLGAGDFALTLGGFTLGGIGTATFGAILLNALLSRRLVDVPPPEVVHQEP

SEQ ID NO: 90 - DNA, 1395 bp, Escherichia coli
gtggttcgatcgcagttatcacgcgctgatgcgccctgcttgttaacctccttaaggagacagctgatggcaatgttcggtcttcctcactggcagttaaaatcgacctctacagagagcggcgtggtcgcgccggatgaacgattgccgtttgctcagacggcagtaatgggcgttcaacacgcggtggcgatgtttggcgcgacggtgttaatgccgattctgatggggctggatcccaatctttccattttaatgtcagggatcggcacgttactgtttttctttattaccggcgggcgcgtgcccagttatctcggctccagcgcggcttttgtcggcgtggtgatcgccgcaacgggctttaacggtcagggcattaacccgaatatcagcattgcgctgggcgggattatcgcctgtgggctggtttataccgtcattggcctggtggtgatgaaaatcggtacgcgctggattgaacggctaatgccgccggtggtgacgggtgcggtggtgatggcgattggcctgaacttagcgcctatcgcggtaaaaagtgtatcggcttcaggctttgatagctggatggcggtaatgacggtgctgtgtattgggctggtggcggtgtttacccgtggcatgatccagcggttattgattcttgtaggattaattgtcgcctgtctgctgtatggcgtgatgaccaacgttttagggctgggaaaagccgtcgattttactctcgtcagccatgctgcctggttcggtctgccacatttttccactcctgcttttaatggtcaggcaatgatgctgattgcgcccgtggcggtgattctggtggcggaaaacttaggtcatctcaaggcggtcgccgggatgaccggacgcaatatggacccgtatatggggcgagcattcgtaggcgatggtctggcaacgatgctttctggttctgtcggcagtagcggcgtcaccacctatgctgaaaatatcggtgtgatggccgtgacaaaagtctactcgacgctggtgtttgttgctgctgccgtcatcgccatgctgttgggcttttcaccgaaatttggcgcgctgattcataccattccggccgcggtgattggtggtgcatcaattgttgtgttcgggctgattgccgtcgcaggcgcaaggatatgggtacaaaaccgtgtcgatttaagccagaacggtaatttgattatggtcgcagtaaccttagtgctgggcgcgggtgattttgctctcacgctgggcggttttacgttgggaggaatcggtacagcaacctttggcgcgattttactcaatgcgttattaagcagaaggttggttgacgttccaccgccagaagttgttcatcaggagccataa

SEQ ID NO: 91 - protein, 620 aa, Escherichia coli
  misc_feature (143)..(143): Xaa can be any naturally occurring amino acid
MDSHTLVQALIYLGSAALIVPIAVRLGLGSVLGYLIAGCIIGPWGLRLVTDAESILHFAEIGVVLMLFIIGLELDPQRLWKLRAAVFGGGALQMVICGGLLGLFCMLLGLRWQVAELIGMTLALSSTAIAMQAMNERNLMVTXMGRSAFAVLLFQDIAAIPLVAMIPLLAASSASTTMGAFALSALKVAGALVLVVLLGRYVTRPALRFVARSGLREVFSAVALFLVFGFGLLLEEVGLSMAMGAFLAGVLLASSEYRHALESDIEPFKGLLLGLFFIGVGMSIDFGTLIENPLRIVILLLGFLIIKIAMLWLIARPLQVPNKQRRWFAVLLGQGSEFAFVVFGAAQMANVLEPEWAKSLTLAVALSMAATPILLVILNRLEQSSTEEAREADEIDEEQPRVIIAGFGRFGQITGRLLLSSGVKMVVLDHDPDHIETLRKFGMKVFYGDATRMDLLESAGAAKAEVLINAIDDPQTNLQLTEMVKEHFPHLQIIARARDVDHYICLRQAGVEKPERETFEGALKTGRLALESLGLGPYEARERADVFRRFNIQMVEEMAMVENDTKARAAVYKRTSAMLSEIITEDREHLSLIQRHGWQGTEEGKHTGNMADEPETKPSS

SEQ ID NO: 92 - DNA, 1863 bp, Escherichia coli
atggatagccatacgctggttcaggcgctgatttatctcggttcggcggcgctgattgtacccattgcagtacgtcttggtctgggatcggtacttggctacctgatcgccggctgcattattggcccgtgggggctgcgactggtgaccgatgccgaatctattctgcactttgccgagattggcgtggtgctgatgctgtttattatcggcctcgaactcgatccacaaaggctgtggaagctgcgtgcggcagtgtttggcggtggcgcattgcagatggtgatttgcggcggcctgctggggctgttctgtatgttacttgggctgcgctggcaggtcgcggaattgatcggcatgacgctggcgctctcctctacggcgattgccatgcaggcgatgaatgaacgcaatctgatggtgacgcawatgggccgcagtgcctttgcggtgctgctgttccaggatatcgcggcaatcccgctggtggcgatgatcccgctactggcggcgagcagtgcctcgacgacgatgggcgcatttgctctctcggcgttaaaagtggcgggcgcgctggtgctggtggtactgctggggcgctatgtcacgcgtccggcgctgcgttttgttgcccgctctggcttgcgggaagtgtttagtgccgtggcgttattccttgtgtttggctttggtttgctgctggaagaggtcggcttgtcgatggcgatgggcgcgtttctggcgggcgtactgctggcaagctcggaataccgtcatgcgctggaaagcgatatcgaaccctttaaaggtttgctgttggggctgtttttcatcggtgttggcatgtcgatagactttggcacgctgattgaaaacccattgcgcattgtcattttgctgctcggtttcctcatcatcaaaatcgccatgctgtggctgattgcccgaccgttgcaggtgccaaataaacagcgtcgctggtttgcggtgttgttagggcagggcagtgagtttgcctttgtggtatttggcgcggcgcagatggcgaatgtgctggagccggagtgggcgaaatcgctgaccctggcggtggcgctgtcgatggcggcaacgccgattctgctggtgatcctcaatcgccttgagcaatcttctactgaagaggcgcgtgaagccgatgagatcgacgaagaacagccgcgggtaatcattgccggattcggtcgtttcgggcagatcaccggacgtttactgctctccagcggggtgaaaatggtggtgctcgatcacgatccggaccatatcgaaacgctgcgtaaatttggtatgaaagtgttttatggcgatgccacgcggatggatttactggaatctgcgggagcggcgaaagcggaagtgctgattaacgccattgacgatccgcaaaccaacctgcaactgacggagatggtgaaagaacatttcccgcatttgcagattattgcccgcgcccgcgatgtcgatcactacatttgtttgcgtcaggcaggcgtcgaaaagccagagcgtgaaacctttgaaggtgcgctgaaaaccgggcgtctggcgctggaaagtttaggtctggggccgtatgaagcgcgagaacgtgccgatgtgttccgccgctttaatattcagatggtggaagagatggcaatggttgagaatgacaccaaagcccgcgcggcggtctataaacgcaccagcgcgatgttaagtgagatcatcaccgaggaccgcgaacatctgtcattaattcaacgacatggctggcagggaacagaagaaggtaaacataccggcaacatggcggatgaaccggaaacgaaaccctcatcctaa

SEQ ID NO: 93 - protein, 334 aa, Escherichia coli
MKTERILGALYGQALGDAMGMPSELWPRSRVKAHFGWIDRFLPGPKENNAACYFNRAEFTDDTSMALCLADALLEREGKIDPNLIGRNILDWALRFDAFNKNVLGPTSKIALNAIRDGKPVAELENNGVTNGAAMRVSPLGCLLPARDVDSFINDVALASSPTHKSDLAVAGAVVIAWAISRAIDGESWSAIVDSLPSIARHAQQKRTTTFSASLAARLEIALKIVRNADGTESASEQLYQVVGAGTSTIESVPCAIALVELAQTDPNRCAVLCANLGGDTDTIGAMATAICGALHGINAIDPALKAELDAVNQLDFNRYATALAKYRQQREAA

SEQ ID NO: 94 - DNA, 1005 bp, Escherichia coli
atgaaaacagaacgtattctcggtgctctttatgggcaggcgttaggggatgcgatggggatgccctccgagctttggccacgcagccgcgttaaagcacactttggctggattgaccgttttctgcctggaccaaaggagaacaacgcggcctgttattttaaccgcgccgaattcaccgacgatacctcgatggcgctgtgtctggcggatgcgttactggaacgtgaaggcaagatcgacccgaatctgattgggcgtaatattctcgactgggcgctgcgtttcgacgcctttaacaaaaacgtactaggtccgacctcgaagattgcgcttaacgccattcgcgacggtaaacccgttgctgaactggaaaacaacggcgtgaccaacggcgcagcgatgcgcgtctcgccattaggttgtttgcttccggcgcgtgatgttgattcctttattaatgatgtggcgctggcgtcgagcccgacccataaatccgatctggcggttgcgggcgcggtagtcatcgcatgggcgatttctcgtgctattgacggagaaagctggtcagcgattgttgattcattgccttcaattgcgcgacatgcacagcaaaaacgcaccaccacgttcagcgcctcactggcagcgcggctggagattgcgctgaaaattgtgcgcaatgccgacggcactgaatccgccagcgaacagctttaccaggtcgttggcgcaggtaccagcactattgagtccgttccgtgcgccattgcgctggttgaactggcacaaaccgacccgaatcgctgcgccgtcctgtgcgctaaccttggcggcgatacagacaccatcggtgctatggcgacggcaatctgcggcgcgttgcatggcattaacgctatcgatcctgcgttaaaggcggagttggatgcggtaaatcagcttgatttcaaccgctatgccacagcgctggcgaaatatcgtcaacaacgggaggcggcatga

SEQ ID NO: 95 - protein, 462 aa, Escherichia coli
MTANSPLQRVGQEKGIAMGSQELQRKLGFWAVLAIAVGTTVGSGIFVSVGEVAKAAGTPWLTVLAFVIGGLIVIPQMCVYAELSTAYPENGADYVYLKNAGSRPLAFLSGWASFWANDAPSLSIMALAIVSNLGFLTPIDPLLGKFIAAGLIIAFMLLHLRSVEGGAAFQTLITIAKIIPFTIVIGLGIFWFKAENFAAPATTAIGATGSFMALLAGISATSWSYTGMASICYMTGEIKNPGKTMPRALIGSCLLVLVLYTLLALVISGLMPFDKLANSETPISDALTWIPALGSTAGIFVAITAMIVILGSLSSCVMYQPRLEYAMAKDNLFFKCFGHVHPKYNTPDVSIILQGALGIFFIFVSDLTSLLGYFTLVMCFKNTLTFGSIIWCRKRDDYKPLWRTPAFGLMTPLAIASSLILVASTFVWAPIPGLICAVIVIATGLPAYAFWAKRSRQLNALS

SEQ ID NO: 96 - DNA, 1389 bp, Escherichia coli
atgactgcaaactctcccctacaacgtgttggacaagaaaaaggtatcgctatgggaagccaggaactccaacgcaagctcggattttgggccgttcttgcaatcgccgtcgggacaaccgtcggctccggtatttttgtatctgtgggtgaagtggcaaaagcggcgggcacgccgtggctgacggtgctcgcatttgtcatcggcgggttaattgtgatcccgcaaatgtgcgtatatgcggaactatccaccgcttatccggaaaatggcgcagattatgtttatctgaaaaatgccggaagccgaccgctggctttcctctccggctgggccagcttctgggccaacgatgcgccgtcattgtcgattatggcgctggcgattgtcagcaatcttggctttttaacgcctatcgatccgttgctcggtaaatttatcgccgccggattaattatcgcctttatgctgctgcacctgcgctccgttgaaggcggcgcagcgtttcagacgctaattaccatcgccaaaattatcccgttcactatcgtcattggtcttgggatcttctggtttaaagcggagaattttgccgcccctgctaccactgcgattggcgcaacgggcagctttatggcgctgctggcggggatctctgccaccagttggtcgtataccggcatggcctctatctgttatatgaccggcgaaattaaaaaccccggcaaaaccatgccacgagcgctgattggttcctgtctgctggttctggtgctctacaccctgctggcgctggtgatttccggcctgatgcccttcgacaaactcgccaattctgaaacgccgatttccgacgccctgacctggatccccgcactcggcagcaccgctgggatctttgttgccatcacggcgatgatcgtcattcttggttcgctttccagctgcgtgatgtaccagccgcggctggaatacgcgatggcgaaagacaacctgttcttcaaatgcttcggccatgtgcatccgaaatacaacacgccggatgtctccatcattttgcaaggggcgctggggatcttcttcatcttcgtttccgatctcaccagcctgctgggctatttcaccctggtaatgtgtttcaaaaataccctcaccttcggctccatcatctggtgtcgtaaacgcgacgattacaaaccgctgtggcgtactccggctttcgggctgatgacccccctcgccattgcgtcaagcctcattctggtcgcctcaacctttgtctgggcaccgattcccggccttatctgcgccgtcatcgttattgccactggtctgcctgcttacgccttctgggcgaagcgtagccgccagctcaacgctttgtcgtaa

SEQ ID NO: 97 - protein, 147 aa, Escherichia coli
MFNNILVVCVGNICRSPTAERLLQRYHPELKVESAGLGALVGKGADPTAISVAAEHQLSLEGHCARQISRRLCRNYDLILTMEKRHIERLCEMAPEMRGKVMLFGHWDNECEIPDPYRKSRETFAAVYTLLERSARQWAQALNAEQV

SEQ ID NO: 98 - DNA, 444 bp, Escherichia coli
atgtttaacaacatcttagttgtctgtgtcggcaatatttgccgttccccgacggcggaacgcttactgcaacgttatcacccggagctgaaagtggagtccgctggactcggcgcgctggtcggtaagggcgctgatcctaccgctatcagcgtcgccgcagaacatcaactgtctctggaaggccactgtgcacgacaaatcagccgccgcctgtgtcgcaactatgacctgattttgaccatggaaaagcgccatatcgaacgcttatgcgagatggcaccggagatgcgcggcaaagtgatgctgtttggtcactgggataacgaatgtgaaatccccgatccgtatcgcaaaagccgggaaacgtttgcagcggtgtacacattacttgaacggtctgcccgccagtgggcgcaggcattgaacgcagagcaggtataa

SEQ ID NO: 99 - protein, 432 aa, Escherichia coli
  misc_feature (350)..(351): Xaa can be any naturally occurring amino acid
  misc_feature (357)..(357): Xaa can be any naturally occurring amino acid
  misc_feature (373)..(373): Xaa can be any naturally occurring amino acid
MAESTVTADSKLTSSDTRRRIWAIVGASSGNLVEWFDFYVYSFCSLYFAHIFFPSGNTTTQLLQTAGVFAAGFLMRPIGGWLFGRIADKHGRKKSMLLSVCMMCFGSLVIACLPGYETIGTWAPALLLLARLFQGLSVGGEYGTSATYMSEVAVEGRKGFYASFQYVTLIGGQLLALLVVVVLQHTMEDSALREWGWRIPFALGAVLAVVALWLRRQLDETSQQETRALKEAGSLKGLWRNRRAFIMVLGFTAAGSLCFYTFTTYMQKYLVNTAGMHANVASGIMTAALFVFMLIQPLIGALSDKIGRRTSMLCFGSLAAIFTVPILSALQNVSSPYAAFGLVMCALLIXXFYTSIXGILKAEMFPAQVRALXVGLSYAVANAIFGGSAEYVALSLKSIGMETAFFWYVTLMAVVAFLVSLMLHRKGKGMRL

SEQ ID NO: 100 - DNA, 1299 bp, Escherichia coli
atggctgaaagtactgtaacggcagacagcaaactgacaagtagtgatactcgtcgccgcatttgggcgattgtgggggcctcttcaggtaatctggtcgagtggttcgatttctatgtctactcgttctgttcactctactttgcccacatcttcttcccttccgggaacacgacgactcaactactacaaacagcaggtgtttttgctgcgggattcctgatgcgcccaataggcggttggctatttggccgtatagccgataaacatggtcgcaaaaaatcgatgctgctatcggtgtgtatgatgtgtttcggctcactggtaatcgcctgtttgcctggttatgaaacaatcggtacgtgggctccggcattattgcttctcgcgcgtttatttcagggattatccgttggcggagaatatggcaccagcgccacctatatgagtgaagttgccgttgaagggcgcaaaggtttttacgcatcatttcagtatgtgacgttgatcggcggacaactgctagccctactggttgtcgtggttttacaacacaccatggaagactctgcactcagagagtggggatggcgtattcctttcgcgttaggagctgtgttagctgttgtggcgttgtggttacgtcgtcagttagatgaaacttcgcaacaagaaacgcgcgctttaaaagaagctggatctctgaaaggattatggcgcaatcgccgtgcattcatcatggttctcggttttaccgctgcgggctccctttgtttctataccttcaccacttatatgcagaagtatctggtaaatactgcgggaatgcatgccaacgtggcgagtggcattatgactgccgcattgtttgtattcatgcttattcaaccactcattggcgcgctgtcggataagattggtcgccgtacctcaatgttatgtttcggttcgctggcagccatttttaccgttcctattctctcagcattgcaaaacgtttcctcgccttatgccgcttttggtctggtgatgtgtgccctgctgatartgartttttatacatcaatcaktggaatactgaaggctgagatgttcccggcacaggttcgcgcattakgcgttggtctgtcatatgcggtcgctaatgctatatttggtggttcggcggagtacgtagcgttgtcgctgaaatcaataggaatggaaacagccttcttctggtatgtgaccttgatggccgtggtggcgtttctggtttctttgatgctacatcgcaaagggaaggggatgcgtctttag

SEQ ID NO: 101 - protein, 648 aa, Escherichia coli
  misc_feature (325)..(325): Xaa can be any naturally occurring amino acid
  misc_feature (388)..(388): Xaa can be any naturally occurring amino acid
MNILGFFQRLGRALQLPIAVLPVAALLLRFGQPDLLNVAFIAQAGGAIFDNLALIFAIGVASSWSKDSAGAAALAGAVGYFVLTKAMVTINPEINMGVLAGIITGLVGGAAYNRWSDIKLPDFLSFFGGKRFVPIATGFFCLVLAAIFGYVWPPVQHAIHAGGEWIVSAGALGSGIFGFINRLLIPTGLHQVLNTIAWFQIGEFTNAAGTVFHGDINRFYAGDGTAGMFMSGFFPIMMFGLPGAALAMYFAAPKERRPMVGGMLLSVAVTAFLTGVTEPLEFLFMFLAPLLYLLHALLTGISLFVATLLGIHAGFSFSAGAIDYXLMYNLPAASQNVWMLLVMGVVFFAIYFVVFSLVIRMFNLKTPGREDKEDEIVTEEANSNTEEXLNQLATNYIAAVGGTDNLKAIDACITRLRLTVADSARVNDTMCKRLGASGVVKLNKQTIQVIVGAKAESIGDAMKKVVARGPVAAASAEATPATAAPVAKPQAVPNAVSIAELVSPITGDVVALDQVPDEAFASKAVGDGVAVKPTDKIVVSPAAGTIVKIFNTNHAFCLETEKGAEIVVHMGIDTVALEGKGFKRLVEEGAQVSAGQPILEMDLDYLNANARSMISPVVCSNIDDFSGLIIKAQGHVVAGQTPLYEIKK

SEQ ID NO: 102 - DNA, 1947 bp, Escherichia coli
atgaatattttaggttttttccagcgactcggtagggcgttacagctccctatcgcggtgctgccggtggcggcactgttgctgcgattcggtcagccagatttacttaacgttgcgtttattgcccaggcgggcggtgcgatttttgataacctcgcattaatcttcgccatcggtgtggcatccagctggtcgaaagacagcgcaggtgcggcggcgctggcgggggcggtaggttactttgtgttaaccaaagcgatggtgaccatcaacccagaaattaacatgggtgtactggcgggtatcattaccggtctggttggtggcgcagcctataaccgttggtccgatattaaactgccggacttcctgagcttcttcggcggcaaacgctttgtgccgatcgccaccggcttcttctgtctggtgctggcggccatttttggttacgtctggccgccggtacagcacgctatccatgcaggcggcgagtggatcgtttctgcgggcgcgctgggttccggtatctttggtttcatcaaccgtctgttgatcccaaccggtctgcatcaggtgctgaacaccatcgcctggttccagattggtgaattcaccaacgcggcgggtacggttttccacggcgacatcaaccgtttctacgctggtgacggcaccgcggggatgttcatgtccggcttcttcccgatcatgatgttcggcctgccgggtgcggcgctggcgatgtacttcgcagcaccgaaagagcgtcgtccgatggttggcgggatgctgctttctgttgctgttactgcgttcctgaccggtgtgactgagccgctggaattcctgttcatgttccttgctccgctgctgtacctcctgcacgcactgctgaccggtatcagcctgtttgtggcaacgctgctgggtatccatgccggcttctctttctctgcgggggctatcgactacscgttgatgtataacctgccggccgccagccagaacgtctggatgctgctggttatgggtgttgtcttcttcgctatctacttcgtggtgttcagtttggttatccgcatgttcaacctgaaaacgccgggtcgtgaagataaagaagacgagatcgttactgaagaagccaacagcaacactgaagaasgcctcaatcaactggcgaccaactatattgctgcggttggcggcactgacaacctgaaagcaattgacgcctgtatcacccgtctgcgccttaccgtggctgactctgcccgcgttaacgatacgatgtgtaaacgtctgggggcttctggggtagtaaaactgaacaaacagactattcaggtgattgttggcgcgaaagcagaatccatcggcgatgcgatgaagaaagtcgttgcccgtggcccggtagcagctgcytctgctgaagcaactccggcaactgccgctcctgtagcaaaaccgcaggctgtaccaaacgcggtatctatcgcggagctggtatcgccgattaccggtgatgtcgtggcactggatcaggttcctgacgaagcattcgccagcaaagcggtgggtgacggtgtggcggtgaaaccgacagataaaatcgtcgtatcaccagccgcaggaacaatcgtgaaaatcttcaacaccaaccacgcgttctgcctggaaaccgaaaaaggcgcggagattgtcgttcacatgggtatcgataccgtagcgctggaaggtaaaggctttaaacgtctggtggaagagggcgcgcaggtaagcgcagggcaaccgattctggaaatggatctggattacctgaacgctaacgcccgttcgatgattagcccggtggtttgcagcaatatcgacgatttcagtggcttgatcattaaagctcagggccatgttgtggcgggtcaaacaccgctgtatgaaatcaaaaagtaa

SEQ ID NO: 103 - protein, 306 aa, Escherichia coli
  misc_feature (74)..(74): Xaa can be any naturally occurring amino acid
  misc_feature (78)..(79): Xaa can be any naturally occurring amino acid
MLKFILRRCLEAIPTLFILITISFFMMRLAPGSPFTGERTLPPEVMANIEAKYHLNDPIMTQYFSYLKQLAHGXFGPXXKYKBYSVNBLVASSFPVSAKLGAAAFFLAVILGVSAGVIAALKQNTKWDYTVMGLAMTGVVIPSFVVAPLLVMIFAIILHWLPGGGWNGGALKFMILPMVALSLAYIASIARITRGSMIEVLHSNFIRTARAKGLPMRRIILRHALKPALLPVLSYMGPAFVGIITGSMVIETIYGLPGIGQLFVNGALNRDYSLVLSLTILVGALTILFNAIVDVLYAVIDPKIRY

SEQ ID NO: 104 - DNA, 921 bp, Escherichia coli
atgttaaaatttattctacgtcgctgtctggaagcgattccgacgctatttattcttattactatttcgttctttatgatgcgcctcgcgccgggaagcccttttaccggcgaacgtactttaccgccggaagtaatggccaatatcgaagcgaaatatcatcttaatgatccgatcatgacacagtatttcagctacctgaaacaactggcgcatggsgawttcggyccaycgttwaaatataaarattattcggtcaatracctggttgcatccagttttcccgtttctgccaaactgggagccgcagcatttttccttgcggtaatactgggtgttagtgctggcgttattgccgcattaaaacaaaacaccaaatgggactataccgtgatggggctggcaatgaccggggttgttatccccagttttgtggttgcgccattattagtcatgatatttgcgatcattttgcattggctgccgggcggtggctggaatggtggggcgcttaaattcatgatattgccgatggtggcgttgtcactcgcctatatcgccagtattgcgcgtattacccgtggctctatgattgaagtattacactccaactttattcgtactgcccgggcgaaagggttacctatgcggcggatcattttacgccacgcattaaaacctgctctgttacccgtgctctcctatatgggccccgcatttgtcggcattattaccggttctatggttatcgaaaccatttatggtttgccggggattgggcaactgttcgttaatggcgcattgaaccgtgactattccttagtgttaagcctgaccatcctggttggtgcgttaaccattttgtttaatgccattgtcgatgtgctatatgcggttatcgacccgaaaatccgttactga

SEQ ID NO: 105 - protein, 504 aa, Escherichia coli
MQQSTPYLSFRGIGKTFPGVKALTDISFDCYAGQVHALMGENGAGKSTLLKILSGNYAPTTGSVVINGQEMSFSDTTAALNAGVAIIYQELHLVPEMTVAENIYLGQLPHKGGIVNRSLLNYEAGLQLKHLGMDIDPDTPLKYLSIGQWQMVEIAKALARNAKIIAFDEPTSSLSAREIDNLFRVICELRKEGRVILYVSHRMEEIFALSDAITVFKDGRYVKTFTDMQQVDHDALVQAMVGRDIGDIYGWQPRSYGEERLRLDAVKAPGVRTPISLAVRSGEIVGLFGLVGAGRSELMKGMFGGTQITAGQVYIDQQPIDIRKPSHAIAAGMMLCPEDRKAEGIIPVHSVRDNINISARRKHVLGGCVINNGWEENNADHHIRSLNIKTPGAEQLIMNLSGGNQQKAILGRWLSEEMKVILLDEPTRGIDVGAKHEIYNVIYALAAQGVAVLFASSDLPEVLGVADRIVVMREGEIAGELLHEQADERQALSLAMPKVSQAVA

SEQ ID NO: 106 - DNA, 1515 bp, Escherichia coli
atgcaacagtctaccccgtatctctcatttcgcggcatcggtaaaacgtttcccggcgttaaggcgctgacggatattagttttgactgctatgccggtcaggttcatgcgttgatgggtgaaaatggcgcaggaaaatcaactctcttaaaaatcctcagcggcaactatgcgccaaccacgggttctgtagtgattaatgggcaggaaatgtccttttccgacacgaccgcagcacttaacgcgggtgtggcgattatttaccaggaactgcatctcgtgccggaaatgaccgtcgcggaaaacatctatctcggccagctgccgcataaaggcggcattgtgaatcgctcattgctgaattatgaggcgggtttacaacttaaacatcttggtatggatattgacccggacacgccgctgaaatatctctccattggtcagtggcagatggttgaaatcgccaaggcgctggcgcgtaacgctaaaattatcgcctttgatgagccaaccagctccctttctgcccgcgaaatcgacaatcttttccgcgttatttgtgaactgcgaaaagaggggcgggtgatcttatacgtttctcaccgtatggaagaaatatttgccctcagcgatgccatcactgtctttaaagatggacgttatgtcaaaacctttaccgatatgcagcaggttgaccacgacgcgctggtgcaggcgatggtcgggcgcgacattggcgatatctacggctggcaaccgcgtagttatggcgaggagcgcctgcgtcttgatgctgtgaaagcaccaggcgtgcgtacgccaataagtctggcggttcgcagtggtgaaattgttgggctgtttggtctggtaggggcggggcgtagcgaattaatgaaaggcatgtttggcgggacgcaaatcaccgccggtcaggtttatatcgaccaacagccgatcgatattcgtaaaccgagccacgccattgccgcaggcatgatgctctgcccggaagatcgcaaagcggaaggcattattcctgtgcactccgttcgcgacaatatcaacatcagtgccagacgtaaacatgtgctcggcggttgtgtaatcaacaacggttgggaagaaaacaatgccgatcaccacattcgttcgctcaacatcaaaacgccgggcgctgagcaactgattatgaatctctcaggtggaaatcagcaaaaagccattctgggccgctggttatcggaagagatgaaggtcattttgctggatgaacctacgcgcggcattgatgttggtgctaagcacgaaatatataacgtgatttatgcgctggcggcgcagggtgtggcggtgctgtttgcctccagcgacttacctgaagtcctcggcgttgccgaccggattgtggtgatgcgcgaaggtgaaatcgccggtgaattgttacacgagcaggcagatgagcgtcaggcactgagccttgcgatgcctaaagtcagccaggcagttgcctga

SEQ ID NO: 107 - protein, 546 aa, Escherichia coli
MNTTPSQRLGFLHHIRLVPLFACILGGILVLFALSSALAGYFLWQADRDQRDVTAEIEIRTGLANSSDFLRSARINMIQAGAASRIAEMEAMKRNIAQAESEIKQSQQGYRAYQNRPVKTPADEALDTELNQRFQAYITGMQPMLKYAKNGMFEAIINHESEQIRTLDNAYTDILNKAVKIRSTRANQLAELAHQRTRLGGMFMIGAFVLALVMTLITFMVLRRIVIRPLQHAAQRIEKIASGDLTMKDEPAGRNEIGRLSRHLQQMQHSLGMTVGTVRQGAEEIYRGTSEISAGNADLSSRTEEQAAAIEQTAASMEQLTATVKQNADNAHYASKLAQEASIKASDGGQTVSGVVKTMGAISTSSKKISEITAVINSIAFQTNILALNAAVEAARAGEQGRGFAVVASEVRTLASRSAQAAKEIEGLISESVRLIDLGSDEVATAGKTMSTIVDAVASVTHIMQEIAAASDEQSRGITQVSQAISEMDKVTQQNASLVEEASAAAVSLEEQAARLTEAVDVFRLNKQSVLAEPRGAGEPVSFAPV

SEQ ID NO: 108 - DNA, 1641 bp, Escherichia coli
atgaatacaactccctcacagcgattaggttttttgcatcacatcaggttggttccgttatttgcctgcattctaggcggtatcttagttctattcgcattaagttcagccctggctggctatttcctctggcaggccgatcgcgatcagcgtgatgttactgcggagattgagattcggaccgggttagcgaacagttcagattttttgcgttcagcccggatcaatatgattcaggccggggctgcgagtcgtattgcggaaatggaagcaatgaagcgaaatattgcgcaagccgaatcggagattaaacagtcgcagcaaggttatcgtgcttatcagaatcggccggtgaaaacacctgctgatgaagccctcgacactgaattaaatcaacgctttcaggcttatatcacgggtatgcaacctatgttgaaatatgccaaaaatggcatgtttgaagcgattatcaatcatgaaagtgagcagatccgaacgctggataatgcttataccgatattttgaacaaagccgttaagatacgtagcaccagagccaaccaactggcggaactggcccatcagcgcacccgcctgggcgggatgttcatgattggtgcgtttgtgcttgccctggtcatgacgctgataacatttatggtgctacgtcggatcgtcattcgtccactgcaacatgccgcacaacggattgaaaaaatcgctagtggcgatctgacgatgaaggatgaaccggcgggtcgtaatgaaatcggtcgcttaagtcgtcatttacagcaaatgcagcattcactggggatgaccgtagggactgttcgacagggtgcggaagagatttatcgtggcaccagcgaaatttcagctggcaatgcggacctgtcatctcgcaccgaagaacaagcggcggctatcgaacaaactgccgccagcatggagcaactcactgcgacggtgaaacagaatgcggataacgcgcattatgccagcaaactggcgcaagaggcttctattaaagccagcgatggcgggcagacggtttccggtgtagtaaaaacgatgggcgctatctccacgagttcgaagaaaatttctgagatcaccgccgtcatcaacagtattgctttccagacgaatattctggcactgaatgctgccgttgaagctgcgcgagcgggtgagcaagggcgtggatttgccgttgtcgccagcgaagtacggacactcgcaagccgcagcgcccaggcggcaaaagaaattgaaggcttgatcagtgaatcagtcaggttaattgacctgggatcggatgaggtggcaacggccgggaaaaccatgagcactattgttgatgccgtcgcgagtgtcacacatatcatgcaggaaattgccgccgcctcggatgagcaaagtaggggcataacgcaggttagccaggcgatttctgaaatggataaggtgacgcaacagaatgcttctctggtagaagaggcctcagcggcggcggtgtcccttgaagaacaggcggcacgattaactgaggcggtggacgtattccgtctgaacaaacaatctgtgttggcagaacctcgcggagcgggtgaaccagttagtttcgctccggtgtga

SEQ ID NO: 109 - protein, 201 aa, Escherichia coli
  misc_feature (195)..(195): Xaa can be any naturally occurring amino acid
MTMTRLKISKTLLAVMLTSAVATGSAYAENNAQTTNESAGQKVDSSMNKVGNFMDDSAITAKVKAALVDHDNIKSTDISVKTDQKVVTLSGFVESQAQAEEAVKVAKGVEGVTSVSDKLHVRDAKEGSVKGYAGDTATTSEIKAKLLADDIVPSRHVKVETTDGVVQLSGIVDSQAQSDRAESIAKAVDGVKSVXNDLKTK

SEQ ID NO: 110 - DNA, 606 bp, Escherichia coli
atgactatgacaagactgaagatttcgaaaactctgctggctgtaatgttgacctctgccgtcgcgaccggctctgcctacgcggaaaacaacgcgcagactaccaatgaaagcgcagggcaaaaagtcgatagctctatgaataaagtcggtaatttcatggatgacagcgccatcaccgcgaaagtgaaggcggcgctggtggatcatgacaacatcaagagcaccgatatctctgtcaaaaccgatcaaaaagtcgtgaccctgagcggtttcgttgaaagccaggcccaggccgaagaggcagtgaaagtggcgaaaggtgttgaaggggtgacctctgtcagcgacaaactgcacgttcgcgacgctaaagaaggctctgtgaagggctacgcgggtgacaccgccaccaccagtgaaatcaaagccaaattgctggcggacgatatcgtcccttcccgtcatgtgaaagttgaaaccaccgatggcgtggttcagctctctggtatcgtagattctcaggcacaaagtgaccgtgctgaaagtatcgccaaagcggtagatggtgtgaaaagcgttmmaaatgatctgaaaactaagtaa

SEQ ID NO: 111 - protein, 274 aa, Escherichia coli
  misc_feature (48)..(48): Xaa can be any naturally occurring amino acid
  misc_feature (259)..(259): Xaa can be any naturally occurring amino acid
MNKTAIALLALLASSVSLAATPWQKITQPVPGSAQSIGSFSNGCIVGXDTLPIQSEHYQVMRTDQRRYFGHPDLVMFIQRLSSQVSNLGMGTVLIGDMGMPAGGRFNGGHASHQTGLDVDIFLQLPKTRRTSAQLLRPQALDLVSRDGKHVVSTLWKPEIFSLIKLAAQDKDVTRIFVNPAIKQQLCLDAGTDRDWLRKVRPWFQHRAHMHVRLRCPADSLECEDQPLPPPGDGCGAELQSWFEPPKPGTTKPEKKTPXPLPPSCQALLDEHVI

SEQ ID NO: 112 - DNA, 825 bp, Escherichia coli
  misc_feature (143)..(143): n is a, c, g, or t
atgaacaaaaccgcgattgcgctgctggccctgcttgccagtagcgtcagcctggcagcgacgccgtggcaaaaaataacccaacctgtgccgggtagcgcacaatcgataggcagtttttccaatggttgtatcgtcggcgntgacacgttgccgatacagtccgaacattatcaggtcatgcgtaccgatcagcgtcgctatttcggtcacccggacctggtgatgtttatccagcgcctgagtagtcaggtgagcaatctgggcatgggtacggtgttgattggcgatatgggaatgcctgctggtgggcgtttcaacggcggtcacgccagccaccagaccggactggatgtcgatatctttctgcaactgccgaaaacacgccggacctccgcgcagctcttgcgcccgcaagcactggacttagtttcccgcgacggtaaacacgttgtctccacgctgtggaagccagaaattttcagcttgatcaaactcgccgcccaggacaaagacgtcacgcgcatttttgttaatccggcgattaaacaacaactttgccttgatgcgggcaccgatcgcgactggttgcgcaaagtgcgaccctggttccagcatcgtgcgcatatgcatgtacgattacgttgtcctgccgatagtctggagtgtgaagatcaacctttaccgccaccaggcgatggttgcggggcagaactgcaaagctggtttgaacctccaaaaccgggaacaacaaagcctgagaagaagacaccgcytccgttgccgccttcctgccaggcgctactggatgagcacgtgatctaa

SEQ ID NO: 113 - protein, 659 aa, Escherichia coli
  misc_feature (421)..(421): Xaa can be any naturally occurring amino acid
MFRLNPFVRVGLCLSAISCAWPVLAVDDDGETMVVTASSVEQNLKDAPASISVITQEDLQRKPVQNLKDVLKEVPGVQLTNEGDNRKGVSIRGLDSSYTLILVDGKRVNSRNAVFRHNDFDLNWIPVDSIERIEVVRGPMSSLYGSDALGGVVNIITKKIGQKWSGTVTVDTTIQEHRDRGDTYNGQFFTSGPLIDGVLGMKAYGSLAKREKDDPQNSTTTDTGETPRIEGFSSRDGNVEFAWTPNQNHDFTAGYGFDRQDRDSDSLDKNRLERQNYSVSHNGRWDYGTSELKYYGEKVENKNPGNSSPITSESNTVDGKYTLPLTAINQFLTVGGEWRHDKLSDAVNLTGGTSSKTSASQYALFVEDEWRIFEPLALTTGVRMDDHETYGEHWSPRAYLVYNATDTVTVKGGWATAFKAXSLLQLSPDWTSNSCRGACKIVGSPDLKPETSESWELGLYYMGEEGWLEGVESSVTVFRNDVKDRISISRTSDVNAAPGYQNFVGFTANGVPVFSYYNVNKARIQGVETELKIPFNDEWKLSLNYTYNDGRDVSNGENKPLSDLPFHTANGTLDWKPLALEDWSFYVSGHYTGQKRADSATAKTPGGYTIWNTGAAWQVTKDVKLRAGVLNLGDKDLSRDDYSYNEDGRRYFMAVDYRF

SEQ ID NO: 114 - DNA, 1980 bp, Escherichia coli
atgtttaggttgaaccctttcgtacgggtcgggctgtgtttgtccgctatttcttgtgcatggcctgtgttagcggtcgatgacgatggcgaaacgatggttgtcactgcatcttccgttgaacaaaaccttaaagatgcacccgccagtatcagcgtcattacccaggaagacctgcagcgaaaaccggtacagaatctgaaggatgtcctcaaagaagtgcctggcgtacaactgacgaacgaaggggataaccgtaagggcgttagtattcgtggtctggacagcagctacaccctgattcttgtcgacggtaaacgcgttaactcccgcaatgccgtcttccgccacaatgatttcgatctgaactggatcccggtcgattccatcgaacgtattgaagtggtccgtggcccgatgtcgtcgctgtacggttccgatgcgctcggcggtgtagtgaatatcatcaccaaaaaaatcggtcagaaatggtcgggtaccgttaccgtcgataccaccattcaggaacatcgcgatcgcggtgatacctataacggtcagttctttaccagtggaccattaattgatggtgtgctgggaatgaaagcttacggcagcctggcaaaacgtgaaaaggatgacccgcaaaactcaacgaccaccgataccggagaaacgccgcgtattgaaggattctccagccgcgacggcaatgtcgaatttgcctggacaccgaatcaaaatcacgattttactgccggatacggtttcgaccgtcaggatcgtgattccgactcgctggacaaaaaccgcctggaacgccagaactactccgtcagccataatgggcgttgggattacggcaccagcgaactgaaatactacggtgagaaagtcgagaacaaaaaccctggcaacagcagcccgataacttccgaaagcaatacggtcgacggcaaatacacgttgccgctgacggcgattaatcagtttctcacggttggcggtgaatggcgtcacgacaaacttagcgatgcggtgaacctgaccgggggaaccagctccaaaacgtctgccagccagtacgcgctgtttgtggaagatgaatggcggatcttcgagccgctggcgctgacgaccggcgtgcgtatggacgatcacgaaacctacggtgaacactggagtccgcgtgcctacctggtttataacgccaccgacaccgtaacggtgaaagggggctgggcgacggcatttaaagcacyttctctgttgcaacttagccctgactggacgagcaattcctgccgtggcgcatgtaagattgtgggtagcccggatctgaaaccagaaaccagcgaaagttgggagctggggctttactacatgggtgaagaaggctggctggaaggggttgaatccagcgttaccgttttccgtaacgatgtgaaagatcgtatcagcatcagccgtacgtctgacgtcaatgctgcaccgggctaccaaaactttgttggttttacagcgaacggtgtgccggtatttagctactacaacgttaacaaagcacgtattcagggcgtggaaaccgagctgaaaattccgttcaacgatgaatggaaactgtcactcaactacacctacaacgatggtcgtgatgtcagcaacggcgaaaacaaaccgctatccgatctgccgttccataccgctaacggtacgctggactggaaaccgctggcgctggaagactggtcattctatgtttctggtcactataccgggcagaaacgagccgacagcgcgacggctaaaacaccgggcggttataccatctggaataccggcgcggcctggcaggtgactaaagacgtcaaactgcgcgcaggcgtgctgaaccttggcgacaaggatctcagtcgtgacgactacagctataacgaagacggacgtcgttactttatggcagtggattatcgcttctga

SEQ ID NO: 115 - protein, 361 aa, Escherichia coli
MFKRRYVTLLPLFVLLAACSSKPKPTETETTTGTPSGGFLLEPQHNVMQMGGDFANNPNAQQFIDRMVNKHGFDRQQLQEILSQAKRLDSVLRLMDNQAPTTSVKPPSGPNGAWLRYRKKFITPDNVQNGVVFWNQYEDALNRAWQVYGVPPEIIVGIIGVETRWGRVMGKTRILDALATLSFNYPRRAEYFSGELETFLLMARDEQDDPLNLKGSFAGAMGYGQFMPSSYKQYAVDFSGDGHINLWDPVDAIGSVANYFKAHGWVKGDQVAVMANGQAPGLPNGFKTRYSISQLAAAGLTPQQPLGNHQQASLLRLDVGTGYQYWYGLPNFYTITRYNHSTHYAMAVWQLGQAVALARVQ

SEQ ID NO: 116 - DNA, 1086 bp, Escherichia coli
atgttcaagcgtcgttatgtaacattgcttcccctttttgtgttgcttgccgcctgtagcagcaagccaaaacctactgagactgaaacgaccaccggaacgccgtctggcggcttcctgcttgagccgcagcacaatgtgatgcagatgggcggcgatttcgctaataacccgaatgcccagcagttcatcgacagaatggtgaacaaacacggtttcgatcgtcagcagttgcaggaaattctctcccaggcgaaacgtctggattcggtactgcggctgatggataaccaggcaccaaccacatcggtgaaaccgccatcaggtccgaacggcgcatggctgcgttatcgcaaaaaatttattacgccggacaatgtgcagaacggtgtggttttctggaatcagtatgaagatgcgttgaatcgcgcgtggcaggtgtatggcgtaccgccggaaattatcgtcgggattatcggcgttgaaacccgctgggggcgcgtgatggggaaaactcgcatcctcgatgcgctggcaacgctgtcatttaactacccacgccgcgcggagtatttctctggcgagctggaaaccttcctgctgatggcgcgcgacgagcaggacgatccgctcaatctgaaaggttcctttgccggggcgatgggctacggacagtttatgccgtcgtcttacaaacaatatgcggtagatttcagcggcgacgggcatatcaacctgtgggatccggttgatgcgatcggtagcgtggcgaattatttcaaagcgcacggctgggtgaaaggcgatcaggtcgcggtaatggcaaacggtcaggctccaggcttgccaaatggcttcaaaaccaggtacagcatttcgcagcttgccgcggcaggtttaacgccacagcagccgctgggcaaccatcaacaagccagcctgctgcgtctggatgttggaacaggttaccagtactggtacggtctgccgaacttctacaccattacccgttataaccacagtacccattacgcaatggcggtctggcagttaggacaagccgtggcgctggcgcgcgtgcagtaa

SEQ ID NO: 117 - protein, 554 aa, Escherichia coli
  misc_feature (292)..(292): Xaa can be any naturally occurring amino acid
MLKRIKIVTSLLLVLAVFGLLQLTSGGLFFNALKNDKENFTVLQTIRQQQSTLNGSWVALLQTRNTLNRAGIRYMMDQNNIGSGSTVAELMQSASISLKQAEKNWADYEALPRDPRQSTAAAAEIKRNYDIYHNALAELIQLLGAGKINEFFDQPTQGYQDGFEKQYVAYMEQNDRLYDIAVSDNNASYSQAMWILVGVMIVVLAVIFAVWFGIKASLVAPMNRLIDSIRHIAGGDLVKPIEVDGSNEMGQLAESLRHMQGELMRTVGDVRNGANAIYSGASEIATGNNDLXSRTEQQAASLEETAASMEQLTATVKQNAENARQASHLALSASETAQRGGKVVDNVVQTMRDISTSSQKIADIISVIDGIAFQTNILALNAAVEAARAGEQGRGFAVVAGEVRNLAQRSAQAAREIKSLIEDSVGKVDVGSTLVESAGETMAEIVSAVTRVTDIMGEIASASDEQSRGIDQVGLAVAEMDRVTQQNAALVEESAAAAAALEEQASRLTEAVAVFRIQQQQQQQRETSAVVKTVTPATPRKMAVADSGENWETF

SEQ ID NO: 118 - DNA, 1665 bp, Escherichia coli
atgttaaaacgtatcaagatcgtgaccagcttactgctggttttggccgtttttggccttttacaactgacatcaggcggtctgttctttaatgccttaaagaatgacaaagaaaatttcactgttttacaaaccattcgccagcagcaatccacgctgaatggcagctgggtcgcgttgttgcagacgcgtaacaccctcaaccgcgcgggtatccgctacatgatggatcagaataatattggtagcggttcaaccgttgctgagctgatgcagagtgccagtatttcgttgaaacaggcggaaaaaaactgggcagattacgaagcgttgccgcgtgacccgcgtcagagcaccgccgcagcggcagagatcaaacgtaattacgatatttatcacaatgcgctggcggagctgatccaactgttaggtgcaggcaaaatcaacgagttctttgatcagccgacccagggatatcaggacggtttcgagaagcagtatgtggcttacatggagcaaaacgatcggctctatgatatcgccgtcagcgataacaatgcctcctacagccaggcgatgtggattctggtgggcgtgatgatcgtcgtactggcggtcatcttcgccgtctggttcggtattaaagcctcgctggtagcgccaatgaatcgcctgattgacagcattcgtcatattgcaggcggcgatctggtgaaaccgattgaggtggatggctctaatgagatggggcaactggcagagagtttgcgccatatgcagggagagctgatgcgtaccgtcggtgatgtgcgcaacggggccaatgccatctatagcggtgccagcgaaatcgctaccggcaataacgatctctyttcgcgcaccgagcaacaggccgcttcgctggaagagacggcagccagcatggagcaactcaccgcaacggtgaaacagaacgccgagaatgcgcgccaggccagccacctggcgttaagtgcttctgaaacggcgcaacgcggcggcaaagtggtagataacgtggtgcagactatgcgtgatatctccaccagttcgcagaaaatcgccgatattatcagcgtaattgacggcattgccttccagaccaatattctggctttgaacgcggcggttgaagcagcgcgtgcgggtgagcaaggacgtggttttgcggtggttgcgggagaagtgcgtaatctggcccagcgtagcgcccaggcggctcgtgaaattaaaagcctgattgaagaytcggtggggaaagtggatgttggctctacgctggtcgaaagcgccggggaaacaatggcggagattgtcagtgctgtgacccgcgtgacggacattatgggcgaaatagcttctgcttctgatgagcagagccgtggtatcgatcaggttggcttagcggttgctgagatggaccgggtaactcaacagaacgctgcgctggtggaagagtctgccgctgccgccgccgcgttggaagagcaggccagtcgcctgaccgaagctgtggcagtgttccggattcagcaacagcagcaacagcagcgtgaaacatcggctgtggtaaaaaccgtgacgccagctacgccgcgtaaaatggcagtggcagatagcggggagaactgggaaacgttttaa

SEQ ID NO: 119 - protein, 34 aa, Escherichia coli
MSDDISLAMEGALAVIAVVGVYCLVVFLMDRLGN

SEQ ID NO: 120 - DNA, 105 bp, Escherichia coli
atgtcggatgatatttcactggcaatggaaggtgcgctggctgttattgctgttgtgggcgtttactgcctggttgtgtttttgatggatcgactagggaactga

SEQ ID NO: 121 - protein, 770 aa, Escherichia coli
MHMFKPRLCSWIGLLPLFMLSLPVQAELRCVANAVDIEPFFSAATAEDKQQVEQAINSSVNLVPFGLSASDWKVHRGDLVVEGNIESNQKLIVLGNLTVKGNISTFSLSNPWVILGNVTATNIVTDSPLLITGSINASGLVFIDSYYDNPSTIKGSINARGIFINDIIAPVVASSTNSEFMVRASDKNDTENVKKALMIINPDAYYWGLINDEDALKEIFKRSNIRMAGNVCNQMKKEALFRLKPSPELVQELQMLDEGNVAAFEGRDIATFDLAIMRTLPRLKGISANLRKQLINSNDGQTIESMARYMPDNEILELTDQQLGYQPVVLGLLDREPLSVEIMTRMSHLPDGVGPLNLALRENLPLDIVMTLAKRDWDMIIQELYKDAWLLPESIIDGYIRSDDSSIRQVGAGGQLTYNQAMQLANDSSNDVVTSLALKLAEMKHHGQLLRMTPQESDKIAVYLYQKFENDDDLIGALFLALPDNLQFNFVKRMEKKSPAYFCCRDMQIIHSDAALQRLLTRFNDPEGWSNLAKNQYLSTSMKQKIWQRALSHRKNNPKADSDAYETSADMILSELISYGEVDDQMLLNATSLIRSDDWDFLESALISWDNLPAVVLKELQQNTPRNDIWAKFFLRQENSSRAQVNEALRVYYALDPDALAQLDVLAKQPDRIWWSTLAKSNLTFFKFGALNNRHTPPAVLAAEIDPEWWIVAMNNPRFPVDVLKARLKRDPLLALKLVNPELDLVRQLALNGKTRAIREQAMRKLDELY

SEQ ID NO: 122 - DNA, 2313 bp, Escherichia coli
gtgcatatgtttaagcccaggctttgcagctggataggtttacttcccctgtttatgctgagtcttccagtacaggcggaacttcgatgcgttgcaaatgcagttgatattgaaccttttttttctgcggctaccgctgaagataaacaacaagttgaacaagctatcaacagtagcgtgaatcttgtccccttcggtttatctgcatcggactggaaagtgcatcgtggcgatttagtggtagaaggtaatatagagagtaatcaaaaattgattgttcttggcaatttgacagtcaaaggtaatatttccactttctctctttctaatccatgggttattctcggtaacgtgacggcaacgaatatagttacggattcaccactgttaattaccggttcgataaatgcaagtggactggtatttatcgactcatattacgataatccgtctacgattaaggggagtattaatgcgcgtgggatatttatcaatgacataattgcacctgttgttgcgtcttcgacaaatagtgaattcatggtccgtgcgagtgacaaaaatgacactgaaaatgtcaaaaaagcgctgatgataataaatcctgatgcatattattggggtctaataaatgatgaagatgctctgaaagaaatttttaagcgaagcaatattcgcatggcagggaatgtctgtaatcagatgaaaaaagaagcgctgtttcgccttaagccttctcctgagttagtgcaggaattgcaaatgctggatgaaggcaacgttgctgcatttgaaggacgagatattgcgacatttgatcttgccataatgcgaactctcccaaggcttaaaggaatttcagctaacctacgcaaacaacttattaatagcaatgatggacaaacgattgaaagtatggcgagatatatgcctgacaatgagattctggagttgaccgatcagcaattgggttaccagcctgttgttctggggttgctcgaccgtgaaccgctctctgtcgaaataatgacgcgaatgagtcatctacctgatggtgtcggtccgttgaatcttgcgctacgtgaaaatctccctctggatatcgtcatgactctggcgaaaagagattgggatatgatcattcaggagctttataaagatgcgtggttattgcccgaatccattattgatggctatatccgcagtgatgattcctctattcgtcaggtcggtgctggaggacaactcacctacaatcaggcaatgcagttggcgaacgattcatcaaacgatgttgtcacaagcttagcgttaaagctggcagagatgaaacaccatggtcaattgttgcggatgacgccacaagagagtgacaaaatagcagtatatttataccaaaaattcgagaatgacgatgatctaataggtgcgttatttttagcgttgccagataacttacagtttaattttgttaaaaggatggagaaaaaatcccctgcctacttttgctgtcgggatatgcagataattcactctgacgctgctttacaacggttattgacacgtttcaacgatcctgaggggtggagtaatctggcgaaaaatcagtatctgagcacgtcgatgaaacaaaaaatttggcaacgtgctttatcgcatcggaaaaataatcccaaagcagattcagatgcatatgaaaccagcgctgatatgattttgtctgagcttatcagctacggtgaagttgatgaccagatgctattaaatgccacctctctgatacgttcggacgactgggactttttagagagtgcattaattagttgggataatttacccgctgttgttctcaaggaattacagcaaaacacgccacgcaatgatatttgggcgaagttttttctgaggcaggaaaacagttcccgtgcgcaggttaacgaagcgttacgtgtttattatgcactagaccccgatgcgttagcacaactggatgtactggcaaaacaaccggatcgtatatggtggagtacactggcgaaaagcaatctcacatttttcaagttcggcgcacttaacaaccgccacacaccgcctgcagtactggcggcagaaattgatcccgagtggtggattgtggcgatgaataatccccgttttccagttgatgtattaaaggcgaggctgaaacgtgatcctttgctggcgttaaagcttgttaaccctgaactggatttagttcgccagctggcgcttaacggtaagacgcgcgcaatacgggaacaagcgatgagaaaacttgatgagttgtattga

SEQ ID NO: 123 - protein, 252 aa, Escherichia coli
MILHAQAKHGKPGLPWLVFLHGFSGDCLEWQEVGEAFADYSRLYVDLPGHGGSAAISVDGFDDVTDLLRKTLVSYNILSFWLVGYSLGGRVAMMAACQGLAGLCGVVVEGGHPGLQNAEQRAERQRSDRQWAQRFRSEPLTAVFADWYQQPVFASLNDDQRRELVVLRSNNNGATLAAMLEATSLAVQPDLRANLSARTFAFYYLCGERDSKFRALAAELAADCHVIPRAGHNAHRENPAGVIASLAQILRF

SEQ ID NO: 124 - DNA, 759 bp, Escherichia coli
atgatcctgcacgcgcaggcaaaacacggcaaaccaggtttaccctggctggtgtttttgcacggtttttccggcgattgcctcgaatggcaggaagtcggcgaggcgtttgccgactactcacggttgtatgttgatctcccaggtcacggtggttcggcggcgattagcgtcgatggatttgatgatgtcaccgacttactgcgtaaaaccctggttagttacaacatccttagcttctggctggtggggtactcgcttggcggacgggtggcgatgatggccgcttgccaggggctggcggggctttgtggggttgttgtcgaaggcggtcatccggggctgcaaaatgctgaacaacgcgcggaacgtcagcgttccgatcgccaatgggcgcagcgttttcgttccgaaccattaaccgcggtatttgccgactggtatcaacagcctgtttttgcctcgctcaatgacgatcaacgccgggagctggtggtgctgcgcagcaacaataatggcgcaacccttgccgccatgctggaggcgacttctctcgccgtccagcctgatttacgtgctaaccttagcgcccgcacatttgcgttttattatttatgtggtgaacgtgacagcaaattccgcgccctggcggcggaactggctgccgactgccatgtcattcctcgcgccggacataacgcgcatcgggaaaatcccgctggcgtaatcgcaagtctggcgcagatcttgcgtttctga

SEQ ID NO: 125 - protein, 557 aa, Escherichia coli
MSFRHVSFILLLTSQKYHGLFMKVFHNIFKYISSNHQDKHSDKVNNHQHHGKVDKKHRSEIVEIDKLDKHSQIDNDFGLHIIYFLQHGCWNVTEHSPQIEKIWFYNSEPSIDIKEYNSFADNTTDTFIFTIIPDNNHVIKLSSPITVTIERKDGYYFINFSGDKSDIIYKVDGFSIKERNFFTLLSGNFKPDWRWAVSKETFTKEKFDSYVESVFSKIDFYKQCGVINPQNANTAYFGDTDGRVGAVLYALLVSGHIGIREKGWSLLCDLLKHEDMASFAYENKKLKKLFTLLDKRDMILNELHQHVFLKGDAITPCIFLGDHTGDRFSTIFGDKYILTLLNSMRNMEGNKDSRINKNVVVLAGNHEINFNGNYSARLANHKLSSGDTYNLIKTLDVCNYDSERHVLTSHHGIIRDEENKCYCLGALQVPFNQMKNPTDPEELAYIFNKKHKQHMDDHLFHLIRSNTMAPTPVYADYLNNTTDFRPDPEDIFKCGQTLECGDPRKNIRQKYGHHGLGVNQNQQFDNGVMGLNSRMAVFDENKKIIGSSSGLSCFQPH

SEQ ID NO: 126 - DNA, 1674 bp, Escherichia coli
atgtctttcagacatgtatcatttattttgttactaacaagtcaaaaatatcacgggttatttatgaaagtatttcacaatatatttaagtacatctcttcaaaccatcaagataagcattcagataaagttaataatcatcaacaccatggcaaggttgataaaaaacatcgttcagagatagttgaaattgataagctggataaacattcgcaaatagataacgattttggcctgcatatcatctatttcctgcaacatggctgctggaacgtaactgaacatagtcctcagatagagaaaatatggttttacaatagtgagccatctatagatattaaagaatataatagtttcgccgacaatactactgacacgtttatmtttacaattataccagacaataaccatgtgataaaattatcgtctcccattaccgttacgattgagcgtaaggacggttattattttattaatttctccggggataaatcagacataatttataaagttgatgggttttctatcaaagagagaaatttctttactcttcttagtggtaatttcaaacctgactggcgttgggctgtctctaaagagacgtttactaaggaaaagtttgatagctatgttgaatctgttttttcaaaaatagacttttataaacagtgtggtgtgattaacccacaaaatgccaacacggcttattttggcgatacagatggaagagtaggcgctgtactttatgcattgctcgtttcagggcatataggcatcagggaaaaggggtggagtttattatgtgatttattgaaacacgaagacatggcttcattcgcatatgaaaataaaaaattgaaaaaactcttcactttattagataagagagacatgatcttgaatgagttgcatcaacatgtttttttaaaaggcgatgcgattaccccttgtatcttccttggggatcatacaggcgatagattcagtactatttttggtgataaatatatccttactttgctaaattctatgcgaaatatggagggtaataaagatagtcgtataaataaaaatgtcgttgttctggctggaaatcatgaaatcaattttaatggtaactatagtgcacgactagcaaatcataaactctcttccggtgatacatataacttaattaaaacgctcgatgtttgtaattatgactcagaaaggcatgttttaaccagtcatcacggaataataagggatgaagaaaataaatgttattgtctcggtgctttgcaggttccatttaatcagatgaaaaatcctactgatcctgaggaattagcatatatatttaataaaaaacataaacaacatatggatgatcatcttttccatctaattagaagcaatactatggcacccacacctgtatatgctgattatttaaataacactactgatttcagaccagatcctgaagatatcttcaaatgtggacagacgctcgaatgtggcgacccccgcaaaaacattagacaaaaatatggccatcatgggttaggggtaaatcagaatcaacaatttgataatggtgttatggggctaaattccaggatggcagtgtttgatgaaaataaaaaaataataggttcttcctcaggactaagttgttttcaaccacattaa

SEQ ID NO: 127 - protein, 290 aa, Escherichia coli
MSEKLQKVLARAGHGSRREIESIIEAGRVSVDGKIAKLGDRVEVTPGLKIRIDGHLISVRESAEQICRVLAYYKPEGELCTRNDPEGRPTVFDRLPKLRGARWIAVGRLDVNTCGLLLFTTDGELANRLMHPSREVEREYAVRVFGQVDDAKLRDLSRGVQLEDGPAAFKTIKFSGGEGINQWYNVTLTEGRNREVRRLWEAVGVQVSRLIRVRYGDIPLPKGLPRGGWTELDLAQTNYLRELVELPPETSSKVAVEKDRRRMKANQIRRAVKRHSQVSGGRRSGGRNNG

SEQ ID NO: 128 - DNA, 873 bp, Escherichia coli
atgagcgaaaagctacagaaagtgctggcgcgtgccggccacggttctcgccgtgaaatcgaatctattattgaagccggtcgtgtgagtgttgatggcaaaattgctaaactcggcgatcgcgttgaagttacccctggattgaaaatccgtatcgatggtcacctgatttcggtacgtgagtccgctgaacaaatttgtcgcgttctggcctattataaaccggaaggtgagttgtgtacccgtaacgatccggaagggcgtccaacggtgtttgaccgtctgccaaagctgcgcggtgcacgctggattgccgtaggtcgtctggacgttaacacctgtggtctgttgctgttcaccaccgacggtgaactggctaaccgtttaatgcatccaagccgtgaagttgaacgtgaatatgccgtgcgtgtatttggtcaggttgacgacgcgaaactgcgtgatttaagccgtggtgtgcagctggaagatggtccggcagcctttaaaaccatcaagttcagcggcggcgaagggatcaaccagtggtacaacgtgactctgaccgaaggccgtaaccgtgaagttcgtcgtctgtgggaagcggttggcgtgcaggtaagccgcctgatccgtgttcgttacggtgatatcccactgccgaaaggtctgccacgcggcggctggacggagctggatcttgcccagactaactatctgcgcgaactggtggagttgccgccagaaaccagctctaaagtcgctgtagaaaaagaccgtcgtcgcatgaaggcgaatcagattcgtcgtgcggtgaaacgtcacagtcaggtgagcggcggacgtcgttctggtgggcgtaataacggttaa

SEQ ID NO: 129 - protein, 188 aa, Escherichia coli
MGNTKLANPAPLGLMGFGMTTILLNLHNVGYFALDGIILAMGIFYGGIAQIFAGLLEYKKGNTFGLTAFTSYGSFWLTLVAILLMPKLGLTDAPNAQFLGVYLGLWGVFTLFMFFGTLKGARVLQFVFFSLTVLFALLAIGNIAGNAAIIHFAGWIGLICGASAIYLAMGEVLNEQFGRTVLPIGESH

SEQ ID NO: 130 - DNA, 567 bp, Escherichia coli
atgggcaacactaagttggctaatccggcaccgctgggcctgatgggcttcggcatgaccaccattctgcttaacctgcacaacgtaggttatttcgctctggacggtattattcttgccatgggcattttctacggcggcatcgcgcaaatttttgctggtctgctggagtacaaaaaaggcaacactttcggtttaaccgcattcacctcttacggttctttctggctgacgctggttgcgattctgctgatgccgaaactgggtctgaccgatgcgccaaatgcacagttccttggtgtctacctgggtctgtggggcgtatttacgctgtttatgttcttcggcacgctgaaaggcgcacgcgttctgcaattcgttttctttagcctgaccgtgctgtttgccctgctggcgatcggtaacattgccggtaacgccgcaatcatccactttgccggctggattggtctgatctgcggtgccagcgcaatctatctggcgatgggtgaagtactgaacgagcagtttggtcgcaccgttctgccgattggtgaatcccactaa

SEQ ID NO: 131 - protein, 134 aa, Escherichia coli
MHVIDLSYFVKIYRSKNKHISVNFLRHLHRAGDLHLSGTTRCIYEDVIMKKCLTLLIATVLSGISLTAYAAQPMSNLDSGQLRPAGTVSATGASNLSDLEDKLAEKAREQGAKGYVINSAGGNDQMFGTATIYK

SEQ ID NO: 132 - DNA, 405 bp, Escherichia coli
atgcatgtcattgatttgtcttattttgtaaaaatatatcgttcaaaaaataagcacatctctgtcaattttttgcgtcatttgcatcgcgcaggcgacctacacttatcaggcactacccgttgtatttatgaggatgtcattatgaaaaagtgcctcacactactgattgccaccgtcctgagcggaatctctctcacggcttatgccgcgcaaccgatgagtaacctggacagcggtcagctacggcccgccggtaccgtttcggcaactggcgcatcaaacctaagcgatctggaggataaactggcagaaaaagcgcgcgagcaaggcgcgaaaggttatgtcattaattccgcaggcggaaatgaccagatgttcggtactgcaaccatctacaaataa

SEQ ID NO: 133 - protein, 342 aa, Escherichia coli
MRKIVAMAVICLTAASGLTSAYAAQLADDEAGLRIRLKNELRRADKPSAGAGRDIYAWVQGGLLDFNSGYYSNIIGVEGGAYYVYKLGARADMSTRWYLDGDKSFGFALGAVKIKPSENSLLKLGRFGTDYSYGSLPYRIPLMAGSSQRTLPTVSEGALGYWALTPNIDLWGMWRSRVFLWTDSTTGIRDEGVYNSQTGKYDKHRARSFLAASWHDDTSRYSLGASVQKDVSNQIQSILEKSIPLDPNYTLKGELLGFYAQLEGLSRNTSQPNETALVSGQLTWNAPWGSVFGSGGYLRHAMNGAVVDTDIGYPFSLSLDRNREGMQSWQLGVNYRLTPNLH

SEQ ID NO: 134 - DNA, 1029 bp, Escherichia coli
atgagaaaaatagtggccatggccgttatttgcctgacggctgcctctggccttacctctgcttacgcggcgcaactggctgacgatgaagcgggactacgcatcagactgaaaaacgaattgcgcagggctgataagcccagtgctggcgcgggaagagatatttacgcatgggtacagggaggattgctcgatttcaatagtggttattattccaatattattggcgttgaaggcggagcgtattatgtttataaattaggtgctcgtgctgatatgagtacccggtggtatcttgatggtgataaaagttttggctttgccctcggggcagtaaaaataaaacccagtgaaaatagcctgcttaaattaggtcgcttcgggacggattatagttatggtagcttaccttatcgtattccgttaatggctggcagttcgcaacgtacattaccgacagtttctgaaggagcattaggttattgggctttaacgccaaatattgatctgtggggaatgtggcgttcacgagtatttttatggactgattcaacaaccggtattcgtgatgaaggggtgtataacagccagacgggaaaatacgataaacatcgcgctcgttcttttttagccgccagttggcatgatgataccagtcgctattctctgggggcatcggtacagaaagatgtttccaatcagatacaaagtattctcgagaaaagcataccgctcgacccgaattatacgttgaaaggggagttgctcggcttttacgcgcaactcgaaggtttaagtcgtaataccagccagcccaatgaaacggcgttggttagtggacaattgacctggaatgcgccgtggggaagcgtatttggcagtggtggttatttgcgccatgcaatgaatggtgccgtggtggataccgacattggctatcccttttcattaagtcttgatcgtaaccgtgaaggaatgcagtcctggcaattgggcgtcaactatcgtttaactcccaatttacactga

SEQ ID NO: 135 - protein, 397 aa, Escherichia coli
MSTLSQTPSPHHQHAYWGGIFAMTLCVFVLIASEFMPVSLLTPIARDLGVTEGLAGRGIAISGALAVLTSLTLSTLAGKMNRKFLLLGMTVLMAVSGLIIALATSYLMYMVGRAMIGVAIGGFWSMSAATAIRLVPQHQVTRALAIFNAGNALATVVAAPLGSYLGATVGWRGAFLCLVPMAVVAFIWQCISLPSMDANKSHTSCGAVFRLFSRRMVVVGMIACGLFFMGQFALFTYVRPFLESVTRVNSLGLSLILLIIGVAGFIGTLVVSIFLNRKCYPTLMAIPGLMAVIAIGLMLTGHHVWMVSLLLGLWGMLATAAPTGWWTWIARTLPDNAEAGGGLMVAVIQLSIALGSTAGGIVFDRLGWQSTFAMSSVLLLCAGVLTFVTARQKAGAL

SEQ ID NO: 136 - DNA, 1194 bp, Escherichia coli
atgtcgacactaagccaaacaccatcacctcatcatcagcacgcatactggggcggtatttttgccatgaccctgtgcgtgtttgtgctgattgcttctgaatttatgcccgtcagcctgctcacgccgattgcccgtgacctgggcgtgacggaggggctggcagggcgggggattgctatctccggtgcgctggcggttctgaccagcctgacgctttcaacgctagctggaaagatgaatcgtaagttcctgctgctggggatgacggttctgatggccgtatcggggcttattattgcgctggctaccagttatctgatgtatatggtcggtcgtgcgatgattggtgtggccattggcggattctggtcgatgtcagcggcaacggcgattcgtctggtgccgcagcatcaggtcacgcgtgcgctggcgattttcaacgccggtaatgcgctggcgacggtcgtggccgcgccgctgggaagctatctgggggctacggtcggatggcgaggcgctttcttgtgcttggtgcccatggcggttgtcgcctttatctggcagtgcattagtctgcccagcatggatgcgaataaaagccacacgtcatgtggcgcggtattccgcttatttagccgccgcatggttgtggtcggcatgatagcttgtggcctgtttttcatggggcagtttgcgctattcacctatgtgcgcccatttctggagtcggtgacacgggttaattccttaggcttgtcgttgattttgctgattatcggcgtggccggttttattggcacgctggttgtttcgatatttctcaacagaaaatgctaccccacgctgatggccatacccggactgatggccgtcattgccatcggtctgatgcttaccgggcatcacgtctggatggtctcgctgctgttaggactctggggcatgctggccaccgccgcgccaaccggatggtggacatggattgcgcgtacgttgcctgacaacgccgaagccggaggcgggctcatggtcgcggtgattcagctctcaatcgcccttggatcaacggcaggaggcatcgtgtttgaccgccttggctggcagagtacgtttgccatgagtagtgtgctgctcctttgcgcgggcgtactgacctttgttacagcacgccagaaggccggtgcgctttag

SEQ ID NO: 137 - protein, 1645 aa, Escherichia coli
MSEGPGGPQGATAGGTLAMRMLSQRAMAASQMKRAANDKAIAQMLASKKSGPPAARLGDEIQHKSFLGALAGAVLGAIVTIAEGCLIMAACATGPYALVLVPALMYASYKASDYVEEKQNQLESWINSFCDTDGAINTGSKNVKINGKPAARAAVTLPPPPPPGAIPEVPQGEPSWGDIATDLLESAAEKAVPLAKAWGNAVITLTDSNAGFMDRVSAGASLLFPAGPVLMEFATMVGGRGEIKKDVDFPEAGEDTALCDKENKPPRIAQGSSNVFINNQPAARKGDKLECSAAIVEGSPDVFIGGEQVTYLDIQPEFPPWQRMILGGITIASYLLPPAGLLGKLGNLAKLGKLGNLLGKSGKLLGAKLGALLGKTGNSLKSIANKVIRWVTDPVDPVTGAYCDERTDFTLGQTLPLSFTRFHSSVLPLHGLTGVGWSDSWSEYAWVREQGNRVDVISLGATLNFAFDGESDTAVNPYHAQYILRRRDDYLELFDRDALSSRFFYDAFPGMRLRHPVTDDTSDDRLAHSPADRMYMLGGMSDTASNRITFERDTQYRITGVSHTDGIRLKLTYHASGYLKAIHRTDNGIQTLATYEQDARLDYHLFYEYDAADRIIRWSDNDQTWSRFTYDAQGRCVTVTGAEGYYNATLDYGDGCTTVTDGKGIHRYYYDPDGNILREEAPDGSTTTYEWDEFHHLLARHSPAGRVEKFEYNAAHGQLSRYTAADGADWQYCYDERGLLSNITAPAGQTWTQQCDERGLPVSLVSPQGEETRLAYTPQGLLSGIFRQDERRLVSPQGEETRLAYTPQGLLSGIFRQDERRLGIEYDHHNWPETLTDVMGREHHTEYSGHDLPVKMRGPGGQSVRLQWQQHHKLSGLERAGTGAEGFRYDRHGNLLAYTDGNGVVWTMEYGPFDLPVARTDGEGHRWQYRYDKDTLQLTEVINPQGESYLYILDNCGRVTEERDWGGVVCRYRYDADGLCTARVNGLEETILYSRDAAGRLAEVITPEGKTQYAYDKSGRLTGIFSPDGTSQRTGYDERGRVNVTTQGRRAIEYHYPDEHTVIRCILPPEDERDRHPDGSLLKTTYRYNAAGELTEVILPGDETLTFSRDEAGREVLRHSNRGFACEQGWNAAGQPVSQRAGLFPAEATWGGLLPSLLREYRYDSAGNVSGVTSREDYGRETHREYRLDRNGQVTAVTASGTGLGYGEGDETYGYDSCGYLKAQSAGRHRISGETDQYAAGHRLKQAGNTQYDYDAAGRMVSRTKHRDGYRPETERFRWDSRDQLTGYRSAQGEQWEYRHDASGRRTEKRCDRKKIRFTYLWDGDSIAEIREYRDDKLYSVRHLVFNGFELISQQFSRVRQPHPSVAPQWVTRTNHAVSDLTGRPLMLFNSEGKTVWRPGQTSLWGLALSLPADTDYPDPRGERDPEADPGLLYAGQWQDAESGLCYNRFRYYEPETGMYLVSDPLGLQGGEQTYRYVPNPCGYIDPLGLAICQLARWTKWGSEQSNISDVLNSLGNRALKYANGDWIKSEAAFNKYINMINKRLELTGSKFRVEIQPAIKNGERVPATTNGPFKVNGKWTSGTHYTGGSKRLDAGIIDITSPTNQYGLHPVIEGFDITLNKTKPSAVDIYSDVFGGIDINDFRL

SEQ ID NO: 138 - DNA, 4938 bp, Escherichia coli
atgagtgaaggaccaggcgggccacagggagcgaccgcaggcggtacgctggcaatgcggatgctgtcgcagcgggcgatggccgccagccagatgaaacgggcagccaacgacaaagccattgcacagatgttggcatcaaaaaagtctggcccccccgccgccaggctgggcgatgaaattcagcacaagagttttttgggggcgctggcaggggccgtgctgggggcgatagtgaccatagcagaaggttgcctgattatggccgcctgtgccaccggcccttatgcgctggttctggtgcctgcgctgatgtatgccagctataaggcgagtgattatgtggaggagaaacagaaccagcttgaatcatggataaacagcttttgtgacacggacggcgccatcaataccggttctaaaaatgtaaaaattaacggaaagccagcagcccgtgcagccgtcacccttccccctcctcccccacctggagcaatacctgaagtcccacagggggaaccctcatggggtgatattgccactgacctgcttgaatcggcagcggaaaaagcagtaccactggcgaaggcctgggggaacgctgttatcaccctgacggacagcaatgccggttttatggatcgcgtcagcgccggcgcatcgcttctgtttcccgccggtccggtattaatggagtttgccaccatggtgggcgggcgtggcgaaatcaaaaaagatgtggatttcccggaagccggtgaggacacggcgctctgcgacaaggagaacaaaccaccgaggatagcccagggcagcagcaacgtctttatcaacaatcagcctgccgcgcgcaagggcgacaaactggagtgcagcgcggcaatcgtggaaggttcgccggacgtctttattgggggtgagcaggtcacctatctggatatccagccggagttcccgccatggcagagaatgatcctgggaggaataacgatagccagctatcttctgccgccagcaggactgctgggaaaactggggaatctggcgaaactgggcaaactgggaaacctgctggggaaaagcggtaagctgctgggcgcaaagctcggcgcgttgctggggaaaacaggtaattcgttaaaaagtattgccaataaagtcatcagatgggtaacagatcctgtcgatccggtaaccggcgcatactgcgacgaacgtaccgactttacgctgggccagacactccccctctccttcacccgtttccacagttctgtactgccgctgcatggcctgacgggcgtgggctggagcgactcctggagcgaatacgcctgggtgcgtgaacagggaaaccgggtggatgtcatcagcctgggagccacgctgaacttcgccttcgacggtgaaagtgatacggcggttaacccgtatcacgcccagtacattctgcgccgccgtgatgattatctggagctgttcgacagggatgcactgagcagccgcttcttttatgacgcctttccgggaatgcgtctgcgccacccggtgactgacgataccagcgatgaccgcctggcacacagccccgcagaccggatgtacatgctgggcgggatgagcgacaccgccagcaaccgcatcacgtttgagcgcgacacccagtaccggatcacgggtgtcagtcacaccgacgggatccggcttaaactgacgtaccacgccagcggctacctgaaagccattcaccgcacggataacggcatacagacgctggcgacctacgaacaggatgcgcggctggactaccacctgttttatgagtacgacgctgcggaccggatcatccgctggtccgataacgaccagacgtggagccgtttcacctacgatgcacagggccggtgcgtgaccgtcaccggggcggagggctattacaacgccacgctggactatggtgacggctgcaccaccgtgacggacggcaagggcattcaccgttattactatgatcctgacggcaatattctgcgggaagaagcgccggacggcagcaccaccacgtatgaatgggatgaattccatcacctgctggcccgccactcccctgccgggcgggtggagaagtttgaatacaacgccgcacacggtcagttaagccgttacacggcggcagacggcgcggattggcagtactgctatgatgagcgcggcctgctcagcaacatcaccgcccctgccgggcagacgtggacgcagcagtgtgatgaacgcggcctgccggtgagtctggtatcgccacagggcgaagagacccggctggcgtacacccctcaggggctgctgtcggggatattccgccaggatgaacggcgtctggtatcgccacagggcgaagagacccggctggcgtacacccctcaggggctgctgtcggggatattccgccaggatgaacggcgtctgggcatagagtacgaccaccacaactggccggaaacactcaccgacgtgatgggccgcgaacaccacaccgaatacagcggtcacgacctgccggtgaagatgcgcggccccggcggtcagtcagtgcggttgcagtggcagcagcaccataaactgagtggccttgagcgggcaggaaccggcgcggaaggattccgctacgaccgccacggcaacctgctggcgtacacggacggtaacggcgttgtctggacaatggagtacggcccgtttgatttgccggtggcgcgaacggacggtgaaggccaccgctggcagtaccgctacgataaagacacgctgcaactgacagaagtcattaacccgcagggcgagtcttatctttatattctggacaactgtggccgggtgacggaagaacgtgactggggcggcgtggtctgtcgttaccgttatgacgctgatggcctgtgtaccgccagggtcaacggcctggaggaaaccatcctctacagccgggatgccgcaggccgcctggcagaagtcatcactccggaaggcaaaacgcagtatgcgtatgacaaatccggcaggctgacgggtatcttcagcccggacggcacatcacagcgcaccggctatgatgaacgcgggcgggtgaatgtcaccactcagggccgacgggccattgaataccactaccccgacgaacacaccgtcatccgctgtatcctgccaccggaagatgaacgcgacagacaccccgacggatccctgctgaaaaccacataccgctacaacgccgccggagaactgacggaggttatcctgccgggggatgagacgctgacgttcagccgtgatgaggcgggacgtgaagtgctccggcacagtaaccggggttttgcctgtgaacagggctggaatgcagccggtcagcctgtcagccagcgcgccggacttttcccggcggaagccacatggggcggactgctcccttcactgctacgggaataccgttacgacagcgcgggtaacgtatcaggcgtcaccagccgggaagattacggacgggaaacacaccgggagtaccggcttgaccggaacggccaggtcacggcggtgacagcctcaggcaccgggctgggctatggcgaaggcgacgagacttatggctatgacagctgcggctacctgaaggcgcagtctgcgggcagacaccggataagcggagagactgaccagtatgccgcaggccaccggctgaaacaggccggaaacacacagtatgactatgacgccgcaggccggatggtcagccgcacaaaacaccgtgacggctaccgcccagaaacagagcggttccggtgggacagccgggaccagctgaccgggtatcgcagcgcacagggggagcagtgggaataccgccacgacgccagcggcagacggacggaaaaacgctgcgaccggaagaaaatccgttttacgtacctgtgggacggcgacagtattgcggaaatccgggaataccgcgatgataaactgtacagcgtaaggcacctggtgtttaacggctttgagctgataagccagcagttcagccgggtacgacagccgcatccgtccgtggccccgcagtgggtgacgcgaacgaatcatgcggtgagcgacctgacgggccgcccgctgatgctctttaacagtgaaggtaaaaccgtctggcggccggggcagaccagcctgtgggggctggcactcagcctgcccgcagacacagactacccggacccgcgcggggagcgggacccggaagcggaccccggcctgctgtatgcgggacagtggcaggatgcagaatcggggctgtgctataaccggttccggtactacgagccggaaaccgggatgtacctggtgagtgatccgctggggttgcagggaggggagcagacttatcggtatgtgccgaatccttgtgggtatatcgatcctttggggctggctatatgtcagttagcccgctggacgaaatgggggagtgagcaaagcaacatatctgatgttttgaactcattagggaatagagcacttaaatatgctaatggtgattggataaaatcagaggctgcattcaataaatacataaacatgataaataaaagactagaattaacaggtagtaaatttagagttgagattcaaccagccataaaaaatggagagcgagttcctgcgacaacgaatggaccatttaaagtaaatggtaagtggacatccggcactcattatacaggtggttccaaacgtctagatgccggtattattgatatcacatctcctacaaaccaatatggattacatccagttattgaaggatttgatataacacttaataaaacaaaaccatcagcagtggatatatattcagatgtgtttggtgggattgatattaacgactttcggttataa

SEQ ID NO: 139 - protein, 349 aa, Escherichia coli
MRVLLRPVLVPELGLVVLKPGRESLPVFHRGRVLVEPEPKNMRALPSGAVPAVRQPLAEDKSLLPFFSDERVIRAAGGAGALSDWLLRHVKSCQWPHGDYHHSETVIHSYGAGAMVLCWHCDNQLRDQTSESLEQLTQQNLTAWMIDVIRHVMNGTQERELSLAELSWWAVCNQVVDALPEAVSRRSLGLPAEKIRSVYRESDIIPGEQTATSILKQRTKNIALPPHTHQQQNPPQEKTVVSIAVDPESPESFMKRPKRRRWVNEKYTRWVKTQPCACCGKPADDPHHLIGHGQGGMGTKSHDIFTLPLCREHHNELHADPLAFEEKHGSQVDLIFRFLDHAFATGVLG

SEQ ID NO: 140 - DNA, 1050 bp, Escherichia coli
gtgcgggtattacttcgacctgttctggttccggaactcgggctggtggtccttaagcccggtcgtgaatcattgccagtttttcatcgcggcagggtgctggtggagccggaaccgaaaaacatgcgggcgctgccatctggagcggttcctgctgttcgccagccgctggcggaagataaatcactgctgccatttttcagcgatgagcgggtgattcgtgcagctggcggcgctggtgcactgtctgactggttattacgtcacgtgaaatcctgccagtggccacacggcgattatcatcacagcgaaaccgttattcacagttacggtgctggcgcaatggtgttgtgctggcactgcgacaaccagctgcgcgaccagacctccgaatcacttgagcaacttactcaacaaaatctgacagcctggatgattgacgtcatacgccatgtaatgaatggcacgcaggagcgggaattatcgctggctgaattatcctggtgggcagtctgcaatcaggtggtggacgcattacctgargcagtatcgcgtcgctctctgggattaccggcggaaaaaatccgctccgtataccgtgaaagcgacatcataccgggagaacagaccgccaccagcatactgaagcagcgcacaaaaaatattgcgctaccgcctcacacccaccagcaacagaacccaccacaggaaaagacggtggtcagcattgccgttgatccggagtctccggaatccttcatgaaacgacctaaacgtcgccgctgggtaaatgagaaatacacacgctgggtaaagacacagccgtgtgcgtgttgtggtaagccagcggacgatcctcatcatctgattggtcatggtcagggcggaatgggaacaaaatcccacgatattttcacgctaccgctgtgtcgggagcatcacaacgagcttcatgcggatccgctggcgttcgaagaaaagcatggttcccaggttgatttaatttttcgttttcttgatcacgcctttgcaaccggcgtgctcgggtaa

SEQ ID NO: 141 - protein, 69 aa, Escherichia coli
MEKTKQEWLYQLRRCSSVNTLEKIIHKNRDSLSTSERESFNSAADHRLAELITGKLYDRIPKEIWKYVR

SEQ ID NO: 142 - DNA, 210 bp, Escherichia coli
atggaaaaaacaaaacaggaatggctgtatcaattacggcgatgttcatcagtcaatacgctggaaaaaattattcataaaaacagagacagtttatcgaccagtgaacgtgaatcatttaattcagcagcagaccaccggttagcagaattaatcaccggaaagttatatgacaggataccaaaagaaatatggaaatatgtaaggtaa

SEQ ID NO: 143 - protein, 388 aa, Escherichia coli
MKLMETLNQCINAGHEMTKAIAIAQFNDDSPEARKITRRWRIGEAADLVGVSSQAIRDAEKAGRLPHPDMEIRGRVEQRVGYTIEQINHMRDVFGTRLRRAEDVFPPVIGVAAHKGGVYKTSVSVHLAQDLALKGLRVLLVEGNDPQGTASMYHGWVPDLHIHAEDTLLPFYLGEKDDVTYAIKPTCWPGLDIIPSCLALHRIETELMGKFDEGKLPTDPHLMLRLAIETVAHDYDVIVIDSAPNLGIGTINVVCAADVLIVPTPAELFDYTSALQFFDMLRDLLKNVDLKGFEPDVRILLTKYSNSNGSQSPWMEEQIRDAWGSMVLKNVVRETDEVGKGQIRMRTVFEQAIDQRSSTGAWRNALSIWEPVCNEIFDRLIKPRWEIR

SEQ ID NO: 144 - DNA, 1232 bp, Escherichia coli
ttgctttgcagtaaattgcaagatttaataaaaaaatgcaaagcaatgattaaaggatgttcagaatgaaactcatggaaacacttaaccagtgcataaacgctggtcatgaaatgacgaaggctatcgccattgcacagtttaatgatgacagcccggaagcgaggaaaataacccggcgctggagaataggtgaagcagcggatttagttggggtttcttctcaggctatcagagatgccgagaaagcagggcgactaccgcacccggatatggaaattcgaggacgggttgagcaacgtgttggttatacaattgaacaaattaatcatatgcgtgatgtgtttggtacgcgattgcgacgtgctgaagacgtatttccaccggtgatcggggttgctgcccataaaggtggcgtttacaaaacctcagtttctgttcatcttgctcaggatctggctctgaaggggctacgtgttttgctcgtggaaggtaacgacccccagggaacagcctcaatgtatcacggatgggtaccagatcttcatattcatgcagaagacactctcctgcctttctatcttggggaaaaggacgatgtcacttatgcaataaagcccacttgctggccggggcttgacattattccttcctgtctggctctgcaccgtattgaaactgagttaatgggcaaatttgatgaaggtaaactgcccaccgatccacacctgatgctccgactggccattgaaactgttgctcatgactatgatgtcatagttattgacagcgcgcctaacctgggtatcggcacgattaatgtcgtatgtgctgctgatgtgctgattgttcccactcctgctgagttgtttgactacacctccgcactgcagtttttcgatatgcttcgtgatctgctcaagaacgttgatcttaaagggttcgagcctgatgtacgtattttgcttaccaaatacagcaatagtaatggctctcagtccccgtggatggaggagcaaattcgggatgcctggggaagcatggttctaaaaaatgttgtacgtgaaacggatgaagttggtaaaggtcagatccggatgagaactgtttttgaacaggccattgatcaacgctcttcaactggtgcctggagaaatgctctttctatttgggaacctgtctgcaatgaaattttcgatcgtctgattaaaccacgctgggagattagataa

SEQ ID NO: 145 - protein, 1021 aa, Escherichia coli
  misc_feature (1003)..(1004): Xaa can be any naturally occurring amino acid
MDQIANLVIDLGIDAAEFKNEIPRIKNLLNGAASDAERSSARMQRFMERQTQAARQTMQAASSAATAASVHAQTVEKSAQAHERMAREVEQTRQRMEALSQKMREEQAQAMALAEAQDKAAAAFYRQIDSVKQAGAGLQELQRIQQQIRQARNSGGIGQQDYLALISEVTAKTRVLTQAEEEATRQKVAFIRQLKEQATRQNLSSSELLRAKAAQLGVSSAAEVYIRKMEQAGKATHSLGLKSAAARQEIGVLIGELARGNLGALRGSGITLANRAGWIDTLMSPKGMMPGAVIGGIAAAVYGLGKAWYDGQKEGEEFNRQLSLTGHYAGVTAGQLWTLSRAISGNGITQHAAAGALAQVVGSGAFRGNDIGMVARAAAQMERSVGQSVSDTINQFKRLKDDPVNAAKALDNELHFLTATQLEQIRVLGEQGRSSDAARIAMSALAEETGRRTADIDNNLNALGSTLKYLSDLWSRFWDAAMNIGREDSLDEQIAALQEKVSRAKRLPWTASSSQVEYDQQRLNDLQEKKRQKDLQDAKEQAERNYQEQQKRRNAENAALNRMNETEAARHQREIARINAMQYADQAVRDAAIQRENERYEKALASGKKKTRETRNDEATRLLLQYSQQQAQVEGQIAAARQSAGIATERMTEARKQLLALQQRISDLDGKKLTADEKSVLARKDELIQALTLLDVKQQELQKQTALNELKKKTIQLTSQLAEEERAQRQQHDLDIATVGMGDQQRQRYQVQLSLRQKYQQQLEQLRRDSEQKGTYNTDDYRKAEQALTESLNRQLNENRRYWQQLEVVQGNWKNGVLRAFQDFTVDADNTAETAEQVFSSAFSNMGNGLATFVTTGKLNFKSFTSSVLSDMAKILAQATMMKSIKGIGSVLGFDLSSLSLNANGGIYQSADLSRYSGTVVNRPTFFAFAKGAGVMGEAGPEAILPLRRGADGKLGVVADIGGSGMAMFSPQYNIEINNDGTNGQIGPAALKAVYDLGKKAAXXFMQQQARDGGRLSGAYR

SEQ ID NO: 146 - DNA, 3066 bp, Escherichia coli
atggaccagatagccaacctggtcattgatttggggattgatgcggcagagtttaaaaatgaaattccccgtatcaaaaaccttctgaatggtgcagccagcgatgcagaacggtcttctgcccgtatgcagcgttttatggagcgtcagactcaggccgcccggcagacaatgcaggcggcttcttcggctgcaacagccgcatccgtccatgcgcagacggtggagaagagcgcacaggctcatgaacgcatggcccgcgaggtggagcaaacccgccagcgtatggaggcactgagccagaaaatgcgcgaggaacaggcgcaggccatggctctggcggaggctcaggataaagcggctgctgcgttttatcgtcagattgacagtgtgaaacaggccggtgcggggctgcaggaattacagcgtattcagcaacagatccgacaggccagaaacagtggcgggattggtcagcaggattatctggcgctgatttctgaggttacggcgaaaacccgtgttcttacacaggctgaggaagaggctacccgacagaaagtggcgtttatccgtcagcttaaagagcaggcaacccgccagaatctttcttcttctgagttgcttcgtgctaaggctgcccagctgggggtaagcagtgctgcagaagtgtatatccgcaaaatggagcaggcaggaaaagccacgcattcgctgggtctgaaaagtgcagcagcccgtcaggagataggcgttctgataggtgaactggcccgcggcaatttaggtgcgctgaggggatccggaataacgctggctaaccgtgccgggtggatagacacactgatgtcaccgaaaggcatgatgccaggagcggttattggcggtattgccgcggctgtctatggtctgggtaaagcctggtatgacggtcagaaggagggggaagaatttaaccgccagctgtcgctgacggggcattatgccggagtcactgccgggcagctgtggacgctcagtcgtgctatttccgggaatggtatcacgcaacatgctgcagccggtgcgctggctcaggtggtggggagtggtgcatttcgtggaaacgatatcggtatggtggcgagagctgccgcacagatggagcgatcggttggccagtcggtcagcgataccataaatcagtttaagcggctgaaggatgatcctgtaaatgccgcgaaggctctggacaatgagctgcattttcttactgccactcagcttgagcagatacgcgtccttggggagcaggggcggtccagtgatgctgcacggatagccatgtctgcactggcagaggaaaccggtcggcgtactgcggatattgataataacctcaatgcgcttggcagtacgctgaagtatctgtctgatttgtggagtcgtttctgggatgcggccatgaatattggtcgtgaagactcgctggatgaacagattgccgctttacaggagaaagtgtcgcgggcgaaaagactcccctggacggcatcatcttctcaggttgaatacgatcagcagcgtcttaacgatcttcaggagaaaaaacgccagaaggatttgcaggatgcaaaagagcaggcagagcggaattatcaggagcaacagaaacgccgtaatgctgaaaatgctgcactgaaccggatgaatgaaacggaagcagcacgacatcagcgtgaaatagcgcgtattaatgccatgcagtacgccgatcaggctgtcagggatgcggcgatacaacgtgaaaatgaacgttacgagaaagccctggcatccggtaagaaaaaaacacgcgaaacccgtaatgatgaggccacccggttattgctgcagtacagtcagcaacaggcacaggtggaaggacagattgctgctgccagacagtcagcaggcattgccacggaaaggatgacagaagcgcgtaaacagcttctggctctgcagcagcgcatcagcgacctggacgggaaaaaactgacggcagatgaaaagagtgtgctggcccgtaaagatgaactgattcaggcactgacgctgctggatgtaaaacagcaggagcttcagaaacagacggcactcaacgagctgaagaaaaaaacaattcagctgaccagtcaactggctgaagaagagcgcgctcagcgtcagcaacatgacctggatatcgccacggtgggtatgggtgatcagcagcgacagcgatatcaggtacaactgagtcttcgccagaaataccagcaacagctggagcagttgaggcgggatagtgagcagaaagggacatataacacggatgactacagaaaggccgagcaggcgctgacggagagcctgaaccgacaactgaatgagaatcgccgttactggcaacagcttgaagttgtacagggtaactggaaaaacggagtcctgcgtgcatttcaggattttaccgtggatgcagataatacggcagaaacagcagaacaggtgttctcgtcagccttcagcaacatgggaaatggcctggcaacttttgtcactaccggcaaactcaatttcaaatccttcacctcttctgtgctgtcagatatggcgaaaatcctggcgcaggcaaccatgatgaaatcgataaaagggattggcagtgtactgggatttgatctcagcagcctttccctgaatgccaatggggggatttatcagtctgctgatttgagtcgttacagtggcacggtggttaaccgtccgacgttttttgcttttgcaaaaggcgcgggtgtgatgggggaagcgggacctgaagccattctgccattgcgtcgtggtgctgacggtaagctgggggttgtggcggatattgggggttcaggtatggcgatgttttccccgcagtacaacatcgagatcaataacgatggcacgaacgggcagataggtccggctgccctgaaggcggtttatgacctcgggaaaaaagcggcascsgmctttatgcaacagcaggcccgtgatggtggtcggttaagtggagcatatcggtaa

SEQ ID NO: 147 - protein, 319 aa, Escherichia coli
MPELNDSISATPKASMKNKSWFRMQAGGPGDADIYIYDEIGFWGVTAKQFVSELNALGDITHINLHINSPGGDVFEGIAIFNALKNQGATITVYVDGVAASMASVIAMAGDTVIMPENAFMMIHKPWGFSGGDAEDMRSYADLLDKVESVLLPAYAQKTGKTTDEIAAMLADETWMSGAECLAHGFADQVTPAVEAMACIQSKRTEEFKKMPESIRNMITPPRNSAPRDTTVTIPAPAVTEPSPVPAVSDEATIRARVMAEQKARMSGINDLFAMFGGRYQTLQAQCVADPDCSLEMARERLLNEMGEPPRVSWRVFYL

SEQ ID NO: 148 - DNA, 960 bp, Escherichia coli
gtgccggaactgaacgacagtatcagcgcgacaccgaaagccagcatgaagaataaatcctggttcaggatgcaagctggggggccgggtgacgcggatatttatatttatgacgagattggtttctggggagttaccgcgaagcagtttgtcagcgaactgaatgcactgggtgatatcacccacattaatctccatatcaattcaccgggtggcgatgtctttgaaggcatcgccatttttaatgccctgaaaaatcagggggcgaccattaccgtgtatgtggatggcgttgccgcctcgatggcatctgtgattgcgatggccggtgatacggtcattatgccggaaaatgccttcatgatgatccataagccatggggattcagtggcggggatgctgaggatatgcgcagttatgccgatttgctggataaagtcgaatcggtactgttgccagcctatgcgcagaaaaccggaaaaaccaccgatgaaattgccgccatgctggcggatgaaacctggatgtccggtgccgaatgtctggcacacggatttgctgaccaggtgacacccgctgttgaggcaatggcatgtattcagtcaaaacgtacagaggaatttaaaaagatgccggaatccatccgaaacatgattactccgccacgcaacagtgccccgcgtgataccacagtgacaatccctgcaccggcggtaacagaaccatcaccggtaccggcagtgtctgatgaggcgaccattcgcgcccgcgttatggctgagcagaaagcccgcatgtcaggcattaacgatctgtttgccatgttcggcggtcgctatcagacgcttcaggcacagtgcgtggctgatcctgactgttcgctggaaatggcccgtgaacgtctgctgaatgaaatgggtgaaccgccccgggtttcctggagagtgttttatctgtga

SEQ ID NO: 149 - protein, 1117 aa, Escherichia coli
MKTPVNPLLQWLNMFFSRRSLSGADGRALYAYRCTDTEYESLAELLRTYAPRSYPRTIFISYSDVLFSIYAAEFIRRTHTVGHPKWDTILDSINWKVPYVHRQKLVNDGIRYWKRKIRNLGQASGYLHTLACEGGLPIRMIENESGYLITYFRRIYQALRGQSSQYPAAKIAQELGDTIPVTMQNELVYEIAGEFCETLCRLLSEHPPHSSDPVSALRKLSPDWHLQLPLVLPEANAAEIVRRLLSQSSEIRSASSLQVERIWVDVDDSWYCDARFRFPATMRTEQLTSLFECHIQPEQTRLIISGKWKNGGARLAMLSRYEQQDWRVELLPIAMQKLSGADAMAEISLSLHEGPILLGHTIPKGGYELTEELPWVFEAMNESESQLKLVGMGSVSSRLNALFISLPKNSHLDISGEGEFDIPRLLKNSERSLTKISGVFSVVLHDGAVCTIRTQQLYDSAIEYYIKSTEVELVKSDYPVHRAWPKIGWKKDLQYGIVPEKELFWRSIRSGNNAWYSVASEMPKGQIEVRRIVNDEVLFSGKVVVLPADFDINIIPESAQQGIIMLSGITDTRIDKYSNNEKVTLKSDYSQNECAIYYNSSLMLENTVDLRVSWKDGSNLKLLLPKPVSGGRFVTNDGSVHFDGVASIAHLHGIDAELLTISCAGRGYLNIELLDENPVAEKFRYLHADLPLLSGRNDKLQQISLYENYNLLNAMLACAWNSNSTLCVDFYSDRFGKDKATLNIKRYDGSFIEHDQGLLVDIKNSVVFPANRIDELVVDAISLKNPGLHISLLKKDEFAYDLSALNVQDSPWLIVGKLDGTARIAPVIKWMLPVLQTNDLLLNALCEADPEQRKKNFNELIFEIDNNPLQNYCCLLTEYIKKYKMNNGLSLLDLDLFRGISSNYRVVVQLLISSCLSGDSDTIYDIQEELPFSWGWIPVSIWKDVFQKCWTYLEKQINDKTLALHILQPFIAFMNHRAHIDRRLAPIANMLLTYSESLPTGCDVLPTVSREQFNEAKQMLLRNPDSFGRISIFPKELWSSAITPELKSVFNKLWIEDKYHSRLEKRFNLMLVAALLTQKDNNLIHQLSALFEFHYQQAPQQLGVIYQYYFEQAGVCH

SEQ ID NO: 150 - DNA, 3354 bp, Escherichia coli
gtgaaaactccagttaacccacttttgcaatggcttaacatgttttttagtcgccgttcattatccggagctgatggacgggcgttatatgcttaccgttgtactgatacagagtacgaaagtttggcagaactactgcgtacatatgccccccgtagttatccaagaacgatattcatttcctatagcgatgttctatttagcatatatgccgcagagtttatccgccggactcatacggtcggacaccctaaatgggacacaattttagattctattaactggaaagttccgtatgttcatcgacagaagctggttaatgatggcattcgctactggaaaagaaagataagaaacctgggacaagcttcgggttatctgcatacactggcttgtgaaggtggtttgcctatccgcatgattgaaaatgagagcggttatttgattacctatttcagaaggatatatcaggcgcttcgtgggcaatcatctcaatatcctgccgctaaaattgcacaagaattaggcgatacgattcctgtcacaatgcaaaacgaactggtctatgaaatagccggtgaattctgcgagactctctgccgattacttagtgagcatcctcctcatagcagtgatcccgtttctgcattacgtaagctctctccagactggcatcttcaacttccactcgttctccccgaagcgaatgctgcagagattgtaaggcgattactttctcaatcttctgaaatacgcagtgcaagtagtcttcaggttgaaagaatctgggtcgatgttgatgacagttggtattgcgatgcccggttccgattcccggccacaatgcgtacagaacagttaacctctttgtttgaatgccatattcagccggagcagacccgactcatcatttcaggaaaatggaaaaatggcggggcaaggttggcaatgctaagccgttatgagcagcaagattggcgggtcgagttattacctattgcgatgcaaaaactctctggtgcagatgcaatggccgaaatctcattgtcgcttcatgaaggtccaattctgttaggtcacacaattccaaaaggcggttatgaacttactgaagaacttccctgggtttttgaagcgatgaatgagagtgaatcgcagctaaaacttgttggtatggggtctgtgagttccaggctaaatgctctgtttatttcgctaccgaaaaatagccatttagatattagtggagaaggtgagtttgatatcccaaggttgctgaaaaacagtgaacgcagcttaactaaaataagtggagtatttagcgttgttttacatgatggtgctgtttgtacaattcgcacccagcaactttatgattctgcgattgaatattatattaaatcgacagaagttgaactggttaaatcggattatcctgtccatcgagcctggccgaagatcggttggaaaaaggatctgcaatatggcattgtaccggagaaagaacttttttggcgttccattcgttcaggtaataatgcctggtattctgtcgcatcagaaatgccaaaaggacagatagaagtccggcgaatagttaatgatgaggttttatttagcggtaaagttgtagttttaccagcagacttcgatattaatattatacctgagagtgctcagcaaggcattattatgctttctggtataacggatactagaattgataaatattcaaacaatgaaaaagtaacacttaagtccgattattcacaaaacgagtgtgctatttattataattcatcgctgatgctggaaaataccgttgatttacgggtctcctggaaagatggttctaatcttaaactattattacctaagccggttagcggtggccgatttgtaactaatgatggttctgttcattttgatggtgtggcatctatagcacatttgcatggaatagatgctgagttattaaccatatcatgtgctggaagaggatatcttaatatcgagttattggatgaaaatccagtagctgaaaaattccgctatttacatgccgaccttcctcttttatcaggacgcaatgacaaattacaacaaatttcactttatgagaactataatttgctaaatgctatgctggcatgtgcatggaacagcaatagtacattatgtgttgatttttactctgacagatttggaaaggataaagcaacactcaatattaaacgctacgatggtagttttattgaacacgatcaagggttactggttgatataaaaaattctgttgtttttcctgcaaatagaatagacgaactggttgttgatgctatttctcttaagaatcctggcttacacatatcattgttaaaaaaagatgagtttgcttatgatctttcagctctgaatgttcaggatagtccatggttaattgtgggaaaacttgatggtacagctcgcattgcaccagtaattaaatggatgctacctgtattgcagacaaatgatttattactaaatgctctatgcgaagcagacccagaacagcgcaaaaaaaattttaatgagctaatttttgaaatagataacaacccattgcaaaattattgctgtttattaacagagtatattaagaaatacaaaatgaataatggcttatccttgctggatctggacttgttcagaggtatttcgagtaattaccgcgtggttgttcaattgttaatatcatcatgtctttctggtgatagcgatacgatttatgatatacaggaagaattacccttttcatggggatggattcccgtttcaatctggaaagatgttttccaaaaatgttggacttatctggagaaacagattaacgataaaacattagcattacatatattgcaaccctttattgcttttatgaaccatcgtgcacatatcgatcgtcggctggctccgattgcgaatatgttacttacatatagtgagagcctaccaaccggttgtgatgtattgccaactgttagtcgtgagcagtttaatgaagctaaacagatgctattaaggaaccccgacagctttgggcgtatcagtatcttccctaaagaactttggtctagtgctattactccagagttaaaatctgtttttaataagctttggattgaagataaatatcactcacggcttgaaaaacgttttaatttgatgttagtcgcagcgctgttaacccaaaaagataataacctgatacatcaactgtctgcgctttttgaatttcactatcagcaagccccacagcaattaggggtaatctatcaatattattttgaacaagcaggagtatgtcattga

SEQ ID NO: 151 - protein, 264 aa, Escherichia coli
MTQPSAPAPQIAIDSHDDKAWRDTLLKVAAILCERQPDSPQGYRLRRHALWQSITSTPQAESDGRTPLAAVSADMVADYQSRLASADMALWQQVEKSVLLAPYWLDGHCLSAQTALRLGYKQVADTIRDEVIRFLERLPQLTGLLFNDRTPFLSEQTKQWLAASPDGKVAPVAQIGEESQAARACFAGQGLEAALRYLDMLPEGDPRDQFHRQYLAAQLTEEAGLIQLAQQQYRMLLMIGSQMMVSDWEPSLLTQLEQKFTAEQ

SEQ ID NO: 152 - DNA, 795 bp, Escherichia coli
gtgacgcaacccagtgctccggctccccaaatcgccatcgacagtcacgacgacaaagcctggcgcgacacgctgttaaaagtggcggctattttatgtgaacgccagccggactcgccgcagggctatcgcctgcgccgccatgccctgtggcaatccatcaccagtacaccccaggcggaaagcgatggacgtaccccactggctgcggtctctgccgatatggtggcggattaccagtcccggcttgccagcgcggatatggcgctgtggcaacaggttgagaaaagcgtattgctggctccttactggctggacggtcactgtctttctgcacagacggcactgcgtctgggttacaaacaggtggcagacaccatccgcgatgaggtcatccgcttccttgagcgtctgccccagcttaccgggctgctgtttaatgaccgcacaccgtttctcagtgagcagacgaaacaatggctggctgcttcgcccgacggcaaagttgcaccggttgcgcaaatcggtgaggaatcgcaggcagccagagcctgttttgctgggcagggtctggaggcggcgctgcgatatctggacatgctacccgaaggcgatccccgcgatcagtttcaccgccagtaccttgccgcacagttgacggaggaggcggggctgatacagcttgcgcagcaacagtaccggatgttgttgatgatagggagtcagatgatggtgtctgactgggagccatcattacttacgcagcttgaacaaaaattcacggcagaacaataa

SEQ ID NO: 153 - protein, 656 aa, Escherichia coli
MNISEVDLHKLTVSDPFLGQYQQLVRDVVIPYQWDALNDRIPEAEPSHAIENFRIAAGLQEGEFYGMVFQDSDVAKWLEAVAWSLCQKPDAELEKTADEVIELIASAQCEDGYLNTYFTVKAPEERWSNLAECHELYCAGHLIEAGVAFFQATGKRRLLGVVCRLADHIDSVFGPDESKLHGYPGHPEIELALMRLYEVTEEPRYLALTNYFVEQRGAQPHYYDQEYEKRGQTSHWHTYGPAWMVKDKAYSQAHLPLAQQQTAIGHAVRFVYLMTGVAHLARLSHDDSKRQDCLRLWNNMAQRQLYITGGIGSQSSGEAFSSDYDLPNDTVYAESCASIGLMMFARRMLEMEGDSQYADVMERALYNTVLGGMALDGKHFFYVNPLEVHPKSLKFNHIYDHVKPIRQRWFGCACCPPNIARVLTSIGHYLYTPREDALYINIYAGNSMEVPVENGTLRLRVSGNYPWQEQVTIAVESPQPVRHTLALRLPDWCTQPQIILNGEEVEQDIRKGYLHITREWQEGDTLNLTLPMPVRRVYGNPLVRHVAGKVAIQRGPLVYCLEKADNGESLHNLWLPTDAPFTTFEGKGLFSHKILIQAPGYRYEQSNPEQQPLWHYDSAPAKRQTQTLTFIPWFSWANRGEGEMRIWVNEEKHCHP

SEQ ID NO: 154 - DNA, 1971 bp, Escherichia coli
atgaacatttcggaagtcgatctgcataaactgacggtcagcgatccgttcctcggtcagtaccaacaactggtccgcgacgtggtgattccttatcagtgggatgccttgaacgatcgtatcccagaagcggaacccagccatgcgattgaaaactttcgcattgccgccggacttcaggagggtgaattttacgggatggtgtttcaggacagcgacgtcgccaaatggctggaagcggtagcctggtcgctgtgccagaagccggacgccgaactggaaaaaaccgccgacgaggtaatcgaactgatcgcctccgcccaatgcgaagacggctatctcaatacttactttacggtaaaagcacccgaagaacgctggagcaatctggcggagtgtcatgaactttactgcgcaggtcatctgattgaagccggagtcgccttcttccaggccacgggaaaacggcgcttgctgggggtcgtttgccgcctggccgatcatatcgacagcgtatttggtccagatgaaagtaagttacacggttatcctggtcacccggaaattgaactggcactaatgcgcctgtatgaagtgactgaagagccgcgctacctggcgctgacgaactattttgtcgaacagcgtggtgcgcaaccgcactattacgaccaggaatatgaaaagcgcgggcagacatcgcactggcacacctacggcccggcgtggatggtgaaagacaaagcctacagccaggcacatttgccccttgcgcaacagcaaaccgccatcggtcacgcggtacgttttgtctatctgatgaccggcgtcgcgcatctcgcgcgtttaagtcacgatgacagcaagcgtcaggactgcctgcggctgtggaacaatatggcccagcgtcagttatatattaccggcggcatcggctcacaaagcagcggcgaagcgttcagcagcgattacgatctgccgaatgacacggtttacgccgaaagttgtgcttccatcggcctgatgatgttcgcccgacgaatgctggaaatggaaggcgacagtcaatatgccgatgtgatggagcgcgcactgtacaacactgtgctcggcggcatggcattggatggcaaacatttcttctatgtgaatccactggaagtacatccaaaatcgctgaaattcaaccatatctacgatcacgttaaaccgatccgccagcgttggtttggctgcgcttgttgtccgccaaatatcgcccgcgtgctgacctcgattggtcattatctctacacgccgcgtgaagatgcgttgtatatcaacatctacgcaggaaacagcatggaagtgccggtagaaaatggcacgctgcgcctgcgggttagcgggaactatccgtggcaggagcaggtgacgattgcggttgaatcgccccagccggtacgtcatacgctggctttacgtctgccggactggtgcacacagccgcagatcatattgaatggggaagaggtcgagcaggatattcgtaaagggtatttgcacattacccgcgaatggcaggagggcgatacgctgaatctgactttgccgatgccggtacgccgcgtttacggtaacccgctggtgcgtcacgtcgccggaaaagtggcgattcagcgcggcccgctggtgtattgcctggaaaaggccgacaacggcgagtcactgcataatctgtggctgcccaccgatgcgccatttacgacatttgaaggcaagggattgtttagccataagatcttaatccaggcaccgggttaccggtatgaacagagcaatccagagcagcaaccgctgtggcattacgacagcgcgccagccaaacgccagacgcaaactctgacctttatcccgtggtttagctgggccaaccggggtgaaggcgaaatgcggatctgggtgaatgaggaaaagcattgccatccgtag

SEQ ID NO: 155 - protein, 115 aa, Escherichia coli
MKSKIFAALLLLPLSTYASSYKCDALQQGQIGSNGKTVTAQSSIDIDGKQMHFSLNGVSWDLSYIGEKQIAKMYSTESGNVSVSFIDANPIIFVLHLVNDDGRKGTYNISECSEL

SEQ ID NO: 156 - DNA, 348 bp, Escherichia coli
atgaagagtaaaatttttgctgcacttctgctactacctctatctacttatgcaagctcctataaatgtgatgctcttcagcagggtcaaattggcagcaatgggaaaaccgttacggcacaatcctccatcgatattgacggcaaacagatgcattttagcttgaacggagtgagttgggatctctcatatattggtgaaaaacagattgcaaagatgtatagcaccgaaagcgggaacgtctctgtatctttcattgatgccaatcccatcatcttcgtgctacatctcgtaaacgatgatggtagaaaaggcacttacaacatcagtgaatgttctgaattataa

SEQ ID NO: 157 - protein, 79 aa, Escherichia coli
MTETQIYENIKQAISSAPRNSQTMEMHLQMIKYADHLKNVTAKEFCEGVGLKASFATEFSKMRNLTERLKAAGLDTTKL

SEQ ID NO: 158 - DNA, 240 bp, Escherichia coli
atgacagaaacccagatctacgagaacattaagcaagccattagcagcgcaccacgaaatagccaaacgatggaaatgcacctccagatgatcaaatacgctgaccatctgaaaaacgtcacggcaaaagagttttgcgaaggtgtaggacttaaagccagctttgctacagagttcagcaaaatgagaaatcttaccgagcgactcaaagccgccggacttgataccacgaagttataa

SEQ ID NO: 159 - protein, 94 aa, Escherichia coli
MLRQLTFLFPTKFHRGKKLRTQRYRGLQSKEKKKLSLLTTKFSDEAWGDNHKNKVVYRAQDRFHNPLFIVLMVVKKKLDHKKLIDNNSHYHVCI

SEQ ID NO: 160 - DNA, 285 bp, Escherichia coli
atgcttcgtcagctaacgttcttgtttccgactaaatttcatcgcgggaaaaagctgagaacccagagatatcgaggcttgcagagcaaagagaagaaaaaattatcactgttaacgacaaaatttagtgatgaggcatggggggataaccataaaaacaaggtggtttacagggcgcaggataggtttcataaccccctgtttattgtgttaatggtggttaaaaaaaaacttgatcataaaaaattgatcgataataattctcattatcacgtttgcatttaa

SEQ ID NO: 161 - protein, 155 aa, Escherichia coli
MEIKLIDNPVKLAEFLNNPVNTGNIVDSGDKYYIKPDAVYLGIYEGLVLAGVHEVRNFWHSVVECHAVYDPGFRGEYALQGHRLFCKWLLENSPFLNSITMVPDTTKYGRAIIRLLGATRVGHLDDAYMSNGKPVGITLYQLPRSKYEELLNVST

SEQ ID NO: 162 - DNA, 468 bp, Escherichia coli
atggaaataaagctcatcgataacccggtgaaacttgcagaattccttaacaacccggtaaacacggggaatatcgtagacagtggagataaatactacatcaagcctgatgcggtatatctcggcatctacgaaggattagtgctggctggagttcatgaagtgcgtaacttctggcatagcgttgttgaatgccatgcggtgtatgaccccggattccgtggcgaatatgcactacaagggcatcgattattctgcaaatggcttctcgaaaactcaccattccttaacagcatcaccatggttcctgacaccaccaaatacggacgggcaattatccgtttgcttggcgctacccgtgttggtcaccttgatgatgcgtacatgagtaacggaaaaccggtaggaatcaccctctatcaattacctcgttcgaaatatgaggagctattaaatgttagtacttag

SEQ ID NO: 163 - protein, 371 aa, Escherichia coli
MPFHSEFLEKIKMQPHETFTGSYQPGDVEFLLKPVVIEMTPVEKKEELIQSGKKHYSDMLSQEPAPTQWHLDLFHRALDRGAERLAKEVTQLAIALAERFGDEPIVLASLVRAGVPLGVMLHQALRDMGKTSWHYGISIIRDRGIDGAALDVIEERHGTSGIVFVDGWTGKGAITGELVRALKDRPGYPEQPRLVVLADPCGCSWLAASDDDWLIPFGIMGAPVSGLISRSVWSSEGLHGCMVCEHLSEFECSRMLADTVAHFRKKLTPSSLAPLSWNTESARVLWQTSRDVIAFLADEFKVDSVNRIKPGIAEATRAVLRRVPDHVFVRSIDDPDVALLVGLAREKGIVVTEMGGTLGQYRAVTIIKKVL

SEQ ID NO: 164 - DNA, 1116 bp, Escherichia coli
atgccatttcacagcgaatttttggagaaaattaaaatgcagccacatgaaacatttaccggctcataccagcccggtgacgtggaatttctgctaaagccggttgtcattgagatgacgccggttgagaaaaaagaagaactgattcagtccgggaagaaacattattcggacatgctcagccaggagccagcgcctacacaatggcatcttgatttgtttcaccgggcgctggatcggggcgcagagaggcttgcaaaagaagtcacacagctcgctattgctctggccgaacgcttcggtgatgagcccattgtactggccagtcttgtcagggctggcgttccgctcggcgttatgctgcaccaggccctgcgtgacatggggaaaacctcatggcattacggtatcagcattatccgggatcgtggaattgacggtgcagccctcgacgtcattgaagagcggcatggtaccagcggtattgtctttgttgacggatggacaggtaaaggcgcaattaccggagagcttgtacgcgcactgaaagatcgcccgggctatcctgagcagccgcgactggttgtcctggccgatccctgtggctgctcctggcttgcagccagtgatgatgactggctcattccttttggcatcatgggggcgccggtatcaggcctgatctcccggtcagtatggtcctctgaaggattacacgggtgcatggtttgcgagcatctcagtgaattcgaatgcagccggatgcttgccgataccgtcgctcatttccgtaagaagttaacaccgtcatccctcgctcccctgagctggaatacggaatcagcccgggtcttatggcagacaagtcgcgacgttatcgcgttcctggccgatgaatttaaagtggacagcgtcaatcgtattaaacccggtattgctgaagcaacccgggctgtattacgtcgggtaccggaccatgtatttgtgcgttctattgacgacccggacgttgccttgcttgtagggcttgctcgtgaaaagggaatagttgttacagaaatggggggaaccctcggccagtatcgggctgtaaccattatcaagaaggtactctga

SEQ ID NO: 165 - protein, 660 aa, Escherichia coli
MSRPQFTSLRLSLLALAVSATLPTFAFATETMTVTATGNARSSFEAPMMVSVIDTSAPENQTATSATDLLRHVPGITLDGTGRTNGQDVNMRGYDHRGVLVLVDGVRQGTDTGHLNGTFLDPALIKRVEIVRGPSALLYGSGALGGVISYDTVDAKDLLQEGQSSGFRVFGTGGTGDHSLGLGASAFGRTENLDGIVAWSSRDRGDLRQSNGETAPNDESINNMLAKGTWQIDSAQSLSGLVRYYNNDAREPKNPQTVGASESSNPMVDRSTIQRDAQLSYKLAPQGNDWLNADAKIYWSEVRINAQNTGSSGEYREQITKGARLENRSTLFADSFASHLLTYGGEYYRQEQHPGGATTGFPQAKIDFSSGWLQDEITLRDLPITLLGGTRYDSYRGSSDGYKDVDADKWSSRAGMTINPTNWLMLFGSYAQAFRAPTMGEMYNDSKHFSIGRFYTNYWVPNPNLRPETNETQEYGFGLRFDDLMLSNDALEFKASYFDTKAKDYISTTVDFAAATTMSYNVPNAKIWGWDVMTKYTTDLFSLDVAYNRTRGKDTDTGEYISSINPDTVTSTLNIPIAHSGFSVGWVGTFADRSTHISSSYSKQPGYGVNDFYVSYQGQQALKGMTTTLVLGNAFDKEYWSPQGIPQDGRNGKIFVSYQW

SEQ ID NO: 166 - DNA, 1983 bp, Escherichia coli
atgtcacgtccgcaatttacctcgttgcgtttgagtttattggccttagctgtttctgccaccttgccaacgtttgcttttgctactgaaaccatgaccgttacggcaacggggaatgcccgtagttccttcgaagcgcctatgatggtcagcgtcatcgacacttccgctcctgaaaatcaaacggctacttcagccaccgatctgctgcgtcatgttcctggaattactctggatggtaccggacgaaccaacggtcaggatgtaaatatgcgtggctatgatcatcgcggcgtgctggttcttgtcgatggtgttcgtcagggaacggataccggacacctgaatggcacttttctcgatccggcgctgatcaagcgtgttgagattgttcgtggaccttcagcattactgtatggcagtggcgcgctgggtggagtgatctcctacgatacggtcgatgcaaaagatttattgcaggaaggacaaagcagtggttttcgtgtctttggtactggcggcacgggggaccatagcctgggattaggcgcgagcgcgtttgggcgaactgaaaatctggatggtattgtggcctggtccagtcgcgatcggggtgatttacgccagagcaatggtgaaaccgcgccgaatgacgagtccattaataacatgctggcgaaagggacctggcaaattgattcagcccagtctctgagcggtttagtgcgttactacaacaacgacgcgcgtgaaccaaaaaatccgcagaccgttggggcttctgaaagcagcaacccgatggttgatcgttcaacaattcaacgcgatgcgcagctttcttataaactcgccccgcagggcaacgactggttaaatgcagatgcaaaaatttattggtcggaagtccgtattaatgcgcaaaacacggggagttccggcgagtatcgtgaacagataacaaaaggagccaggctggagaaccgttccactctctttgccgacagtttcgcttctcacttactgacatatggcggtgagtattatcgtcaggaacaacatccgggcggcgcgacgacgggcttcccgcaagcaaaaatcgattttagctccggctggctacaggatgagatcaccttacgcgatctgccgattaccctgcttggcggaacccgctatgacagttatcgcggtagcagtgacggttacaaagatgttgatgccgacaaatggtcatctcgtgcggggatgactatcaatccgactaactggctgatgttatttggctcatatgcccaggcattccgcgccccgacgatgggcgaaatgtataacgattctaagcacttctcgattggtcgcttctataccaactattgggtgccaaacccgaacttacgtccggaaactaacgaaactcaggagtacggttttgggctgcgttttgatgacctgatgttgtccaatgatgctctggaatttaaagccagctactttgataccaaagcgaaggattacatctccacgaccgtcgatttcgcggcggcgacgactatgtcgtataacgtcccgaacgccaaaatctggggctgggatgtgatgacgaaatataccactgatctgtttagccttgatgtggcctataaccgtacccgcggcaaagacaccgataccggcgaatacatctccagcattaacccggatactgttaccagcactctgaatattccgatcgctcacagtggcttctctgttgggtgggttggtacgtttgccgatcgctcaacacatatcagcagcagttacagcaaacaaccaggctatggcgtgaatgatttctacgtcagttatcaaggacaacaggcgctcaaaggtatgaccactactttggtgttgggtaacgctttcgacaaagagtactggtcgccgcaaggcatcccacaggatggtcgtaacggaaaaattttcgtgagttatcaatggtaa

SEQ ID NO: 167 - protein, 1021 aa, Escherichia coli; identical to SEQ ID NO: 145
  misc_feature (1003)..(1004): Xaa can be any naturally occurring amino acid

SEQ ID NO: 168 - DNA, 3066 bp, Escherichia coli; identical to SEQ ID NO: 146

SEQ ID NO: 169 - protein, 317 aa, Escherichia coli
MRAKLLGIVLTTPIAISSFASTETLSFTPDNINADISLGTLSGKTKERVYLAEEGGRKVSQLDWKFNNAAIIKGAINWDLMPQISIGAAGWTTLGSRGGNMVDQDWMDSSNPGTWTDESRHPDTQLNYANEFDLNIKGWLLNEPNYRLGLMAGYQESRYSFTARGGSYIYSSEEGFRDDIGSFPNGERAIGYKQRFKMPYIGLTGSYRYEDFELGGTFKYSGWVEASDNDEHYDPGKRITYRSKVKDQNYYSVSVNAGYYVTPNAKVYVEGTWNRVTNKKGNTSLYDHNDNTSDYSKNGAGIENYNFITTAGLKYTF

SEQ ID NO: 170 - DNA, 954 bp, Escherichia coli
atgcgggcgaaacttctgggaatagtcctgacaacccctattgcgatcagctcttttgcttctaccgagactttatcgtttactcctgacaacataaatgcggacattagtcttggaactctgagcggaaaaacaaaagagcgtgtttatctagccgaagaaggaggccgaaaagtcagtcaactcgactggaaattcaataacgctgcaattattaaaggtgcaattaattgggatttgatgccccagatatctatcggggctgctggctggacaactctcggcagccgaggtggcaatatggtcgatcaggactggatggattccagtaaccccggaacctggacggatgaaagtagacaccctgatacacaactcaattatgccaacgaatttgatctgaatatcaaaggctggctcctcaacgaacccaattaccgcctgggactcatggccggatatcaggaaagccgttatagctttacagccagaggtggttcctatatctacagttctgaggagggattcagagatgatatcggctccttcccgaatggagaaagagcaatcggctacaaacaacgttttaaaatgccctacattggcttgactggaagttatcgttatgaagattttgagctaggtggcacatttaaatacagcggctgggtggaagcatctgataacgatgagcactatgacccaggaaaaagaatcacttatcgcagtaaagtcaaagaccaaaattactattctgtttcagtcaatgcaggttattacgtaacacctaacgcaaaagtttatgttgaaggcacatggaatcgggttacgaataaaaaaggtaatacttcactttatgatcacaatgataacacttcagactacagcaaaaatggtgcaggcatagaaaactataacttcatcactactgctggtcttaagtacaccttttaa

SEQ ID NO: 171 - protein, 419 aa, Escherichia coli
MAWNQPGNNGQDRDPWGSSKPGGNSEGNGNKGGRDQGPPDLDDIFRKLSKKLGGLGGGKGTGSGGGSSSQGPRPQLGGRVVTIAAAAIVIIWAASGFYTIKEAERGVVTRFGKFSHLVEPGLNWKPTFIDEVKPVNVEAVRELAASGVMLTSDENVVRVEMNVQYRVTNPEKYLYSVTSPDDSLRQATDSALRGVIGKYTMDRILTEGRTVIRSDTQRELEETIRPYDMGITLLDVNFQAARPPEEVKAAFDDAIAARENEQQYIREAEAYTNEVQPRANGQAQRILEEARAYKAQTILEAQGEVARFAKLLPEYKAAPEITRERLYIETMEKVLGNTRKVLVNDKGGNLMVLPLDQMLKGGNAPAAKSDNGASNLLRLPPASSSTTSGASNTSSTSQGDIMDQRRANAQRNDYQRQGE

SEQ ID NO: 172 - DNA, 1260 bp, Escherichia coli
atggcgtggaatcagcccggtaataacggacaagaccgcgacccgtggggaagcagcaaacctggcggcaactctgagggaaatggaaacaaaggcggtcgcgatcaagggccacctgatttagatgatatcttccgcaaactgagcaaaaagctcggtggtctgggcggcggtaaaggcaccggatctggcggtggcagttcatcgcaaggcccgcgcccgcagcttggcggtcgtgtcgttaccatcgcagcggcagcgattgtcattatctgggcggccagtggtttctataccattaaagaagccgaacgcggcgtggtaacacgctttggtaaattcagccatctggttgagccaggtctgaactggaaaccgacgtttatcgacgaagtcaaaccggtgaacgtggaagccgtgcgtgaactggcagcttctggtgtgatgctgacgtcggacgagaacgtagtgcgcgttgagatgaacgtgcagtaccgcgtcaccaatccggaaaaatatctgtatagcgtgaccagcccggatgacagcctgcgtcaggctaccgacagcgccctgcgtggagttatcggtaaatacaccatggaccgcattctgacggaaggtcgtaccgtgattcgtagcgatactcagcgcgaactggaagagacgattcgtccgtatgacatgggtatcacgctgctggacgtcaacttccaggctgctcgtccgccggaagaagtaaaagcggcgtttgacgatgcgattgccgcgcgtgaaaacgaacagcaatacattcgtgaagcagaagcgtataccaacgaagttcagccgcgtgcgaacggtcaggcgcaacgtatcctcgaagaggcgcgtgcgtacaaggcccagaccatcctggaagctcagggtgaagtggcgcgttttgctaaacttctgccggaatataaagccgcgccggaaattactcgcgagcgtctgtatatcgagacgatggaaaaagtgttgggtaacacccgcaaagtgctggttaacgataaaggtggcaacctgatggttctgccgttagaccagatgctgaaaggtggtaacgcccctgcggcgaagagcgataacggtgccagcaatctgctgcgtctgccgccagcctcttcctccacaaccagtggagcaagcaacacgtcgtccaccagtcagggcgatattatggaccaacgccgcgccaatgcgcagcgtaacgactaccagcgtcagggggaataa

SEQ ID NO: 173 - protein, 161 aa, Escherichia coli
MKKWLLAAGLGLALATSAQAADKIAIVNMGSLFQQVAQKTGVSNTLENEFKGRASELQRMETDLQAKMKKLQSMKAGSDRTKLEKDVMAQRQTFAQKAQAFEQDRARRSNEERGKLVTRIQTAVKSVANSQDIDLVVDANAVAYNSSDVKDITADVLKQVK

SEQ ID NO: 174 - DNA, 486 bp, Escherichia coli
gtgaaaaagtggttattagctgcaggtctcggtttagcactggcaacatctgctcaggcggctgacaaaattgcaatcgtcaacatgggcagcctgttccagcaggtagcgcagaaaaccggtgtttctaacacgctggaaaatgagttcaaaggccgtgccagcgaactgcagcgtatggaaaccgatctgcaggctaaaatgaaaaagctgcagtccatgaaagcgggcagcgatcgcactaagctggaaaaagacgtgatggctcagcgccagacttttgctcagaaagcgcaggcttttgagcaggatcgcgcacgtcgttccaatgaagaacgcggcaaactggttactcgtatccagactgctgtgaaatccgttgccaacagccaggatatcgatctggttgttgatgcaaacgccgttgcttacaacagcagcgatgtaaaagacatcactgccgacgtactgaaacaggttaaataa

SEQ ID NO: 175 - protein, 248 aa, Escherichia coli
MTKLKLLALGVLIATSAGVAHAEGKFSLGAGVGVVEHPYKDYDTDVYPVPVINYEGDNFWFRGLGGGYYLWNDATDKLSITAYWSPLYFKAKDSGDHQMRHLDDRKSTMMAGLSYAHFTQYGYLRTTLAGDTLDNSNGIVWDMAWLYRYTNGGLTVTPGIGVQWNSENQNEYYYGVSRKESARSGLRGYNSNDSWSPYLELSASYNFLGDWSVYGTARYTRLSDEVTDSPIVDKSWTGLISTGITYKF

SEQ ID NO: 176 - DNA, 747 bp, Escherichia coli
gtgaccaaactcaaacttctggcacttggagtgcttatcgcaacgtctgcaggcgtagcgcacgctgaaggtaaattttccctgggcgcaggcgtaggtgtcgttgaacacccatataaagattacgataccgatgtttacccagtaccggtaatcaactatgaaggcgataacttctggttccgtggcttaggtggtggttactacctgtggaatgacgcaacggataaactttcaattaccgcttactggtcgccgctttacttcaaagctaaagacagtggcgatcaccaaatgcgtcacctggatgaccgtaagagcaccatgatggctggtctgtcttatgctcactttacccagtacggttacctgcgtaccaccctggctggcgataccctggataacagcaacggcatcgtctgggatatggcctggttgtatcgttacaccaacggtggcctgaccgtgactccgggtattggtgtgcagtggaacagcgaaaaccagaacgaatactattatggcgtatcgcgcaaagagtccgctcgcagcggtctgcgtggctataactcgaacgacagctggagcccttacctggagctgagcgccagctacaacttcctcggcgactggagtgtttacggtaccgcgcgctacacccgtctgtctgatgaagttactgacagcccgattgtggataaatcctggactggcctgatttctaccgggatcacctacaaattctga

SEQ ID NO: 177 - protein, 659 aa, Escherichia coli; identical to SEQ ID NO: 113
  misc_feature (421)..(421): Xaa can be any naturally occurring amino acid

SEQ ID NO: 178 - DNA, 1980 bp, Escherichia coli; identical to SEQ ID NO: 114

SEQ ID NO: 179 - protein, 319 aa, Escherichia coli
  misc_feature (317)..(317): Xaa can be any naturally occurring amino acid
MKKSVIAGVFIALSFTTCSAIANSLALSLANDDAGKFQPILNDIYGNKHENRDDYSQGLFLGYSHDISDSSQLSLHIAQDIYSPSGSNKRHNTAVTGDRAFSAYTHTGIEWNSLANDWIRYRLGTDIGVVGPDAGGQKVQNKAHEIIGAEKYHAWDDQIENRYGYTVKGMLSMTPSMDILGANVGLYPEVSAVTGNLFQYVAYGATIAIGNDKTFNSDNGFGLLAPRGLMHMSDTSGFKYKIFAGMERRDVNRNYTLEGKTIQTKQTTVSLNKTVDEYQVGATIGYAPVAFTLAFNKVTSEFKTGDDYSFINGAITXFF

SEQ ID NO: 180 - DNA, 960 bp, Escherichia coli
  misc_feature (951)..(951): n is a, c, g, or t
atgaaaaaaagtgtcatcgctggcgtctttattgctctgtcatttaccacgtgttcagctatcgcgaacagccttgcattatcattagcaaatgatgatgcagggaagtttcaaccaatacttaatgatatttatggcaataaacatgaaaacagagatgattactcacaaggcttatttctgggatatagccacgatatctcagactcgagccaattatctctccatattgcgcaagatatttactctccatcaggcagtaataaaagacacaacacagctgtaactggagacagagcttttagtgcatacactcacactggtattgaatggaactcccttgcgaatgactggattcgctatcgattaggtactgacataggtgttgttggccccgacgcaggcggtcagaaagtacaaaataaagctcatgagattattggggcagaaaaatatcatgcatgggatgatcaaatagagaatcgctacggttatactgtaaaagggatgctatccatgacaccaagtatggatattttaggtgctaatgttggattataccctgaagtttctgctgttactggaaacttatttcaatatgtagcatatggcgcaaccattgccattggtaatgataaaaccttcaattcggataatggctttggtctgctggctccccgtggtttaatgcatatgtccgatacaagcggattcaaatacaagatttttgcaggtatggaaagacgagatgtcaatcgcaactatactctcgaaggaaaaacaatacagacgaaacaaacaacagtatcgctaaacaaaactgttgatgaatatcaagttggcgcaacaattgggtatgcacctgtagccttcacactagcatttaataaagtaacatcagaattcaagacaggggatgactattcatttataaatggagcaatcaccttntttttttaa

SEQ ID NO: 181 - protein, 302 aa, Escherichia coli
MQLRKPATAILALALSAGLAQADDAAPAAGSTLDKIAKNGVIVVGHRESSVPFSYYDNQQKVVGYSQDYSNAIVEAVKKKLNKPDLQVKLIPITSQNRIPLLQNGTFDFECGSTTNNVERQKQAAFSDTIFVVGTRLLTKKGGDIKDFADLKGKAVVVTSGTTSEVLLNKLNEEQKMNMRIISAKDHGDSFRTLESGRAVAFMMDDALLAGERAKAKKPDNWDIVGKPQSQEAYGCMLRKDDPQFKKLMDDTIAQVQTSGEAEKWFDKWFKNPIPPKNLNMNFELSDEMKALFKEPNDKALN

SEQ ID NO: 182 - DNA, 909 bp, Escherichia coli
atgcaattacgtaaacctgccacagcaatcctggccctggcgctttccgcaggactggcacaggcagatgacgccgccccggcagcgggcagtacgctggacaaaatcgccaaaaacggcgtgattgtcgtcggtcaccgtgaatcttcagtacctttctcttattacgacaatcagcaaaaagtggtgggttattcgcaggattactccaacgccattgttgaagcagtgaaaaagaaactcaacaaaccggacttgcaggtgaaactgattccgattacctcacaaaaccgtattccgctgctgcaaaacggcacttttgattttgaatgtggttctaccaccaacaacgtcgaacgccaaaaacaggcggctttctctgacactattttcgtggtcggtacgcgcctgttgaccaaaaagggcggcgatatcaaagattttgccgacctgaaaggcaaagccgtagtcgtcacttccggcactacctctgaagttttgctcaacaaactgaatgaagagcaaaaaatgaatatgcgcatcatcagcgccaaagatcacggtgactctttccgtaccctggaaagcggtcgtgccgttgcctttatgatggatgatgctctgctggccggtgaacgtgcgaaagcgaagaaaccagacaactgggatatcgtcggcaagccgcagtctcaggaagcctatggttgcatgttgcgtaaagacgatccgcagttcaaaaagctgatggatgacactatcgctcaggtgcagacctccggtgaagcggaaaaatggtttgataaatggttcaaaaatcccattccgccgaaaaacctgaacatgaatttcgaactgtcagacgaaatgaaagcactgttcaaagaaccgaatgacaaagcactgaactaa

SEQ ID NO: 183 - protein, 312 aa, Escherichia coli
MKVAVLGAAGGIGQALALLLKTQLPSGSELSLYDIAPVTPGVAVDLSHIPTAVKIKGFSGEDATPALEGADVVLISAGVARKPGMDRSDLFNVNAGIVKNLVQQVAKTCPKACIGIITNPVNTTVAIAAEVLKKAGVYDKNKLFGVTTLDIIRSNTFVAELKGKQPGEVEVPVIGGHSGVTILPLLSQVPGVSFTEQEVADLTKRIQNAGTEVVEAKAGGGSATLSMGQAAARFGLSLVRALQGEQGVVECAYVEGDGQYARFFSQPLLLGKNGVEERKSIGTLSAFEQNALEGMLDTLKKDIALGEEFVNK

SEQ ID NO: 184 - DNA, 939 bp, Escherichia coli
atgaaagtcgcagtcctcggcgctgctggcggtattggccaggcgcttgcactactgttaaaaacccaactgccttcaggttcagaactctctctgtatgatatcgctccagtgactcccggtgtggccgtcgatctgagccatatccctactgctgtgaaaatcaaaggtttttctggtgaagatgcgactccggcgctggaaggcgcagatgtcgttcttatctctgcaggtgtagcgcgtaaaccgggtatggatcgttccgacctgtttaatgttaacgccggcatcgtgaaaaacctggtacagcaagttgcgaaaacctgcccgaaagcgtgcattggtattatcactaacccggttaacaccacagttgcgattgctgctgaagtgctgaaaaaagccggtgtttatgacaaaaacaaactgttcggcgttaccacgctggatatcattcgttccaacacctttgttgcggaactgaaaggcaaacagccaggcgaagttgaagtgccggttattggcggtcactctggtgttaccattctgccgctgttgtcacaggttcctggcgttagttttaccgagcaggaagtggctgatctgaccaaacgtatccagaacgcgggtactgaggtggttgaagcgaaagccggtggcgggtcggcaaccctgtctatgggccaggctgctgcacgttttggcctgtctctggttcgcgcactgcagggcgaacaaggcgttgtcgaatgtgcctacgttgaaggcgacggtcagtacgcccgtttcttctctcagccgcttctgctgggtaaaaacggcgtggaagagcgtaaatctatcggtaccctgagcgcatttgaacagaacgcgctggaaggtatgctggatacgctcaagaaagatatcgccctgggcgaagagttcgttaataagtaa

SEQ ID NO: 185 - protein, 353 aa, Escherichia coli
MHLRHLFSLRLRGSLLLGSLLVASSFSTQAAEEMLRKAVGKGAYEMAYSQQENALWLATSQSRKLDKGGVVYRLDPVTLEVTQAIHNDLKPFGATINNTTQTLWFGNTVNSAVTAIDAKTGEVKGRLVLDDRKRTEEVRPLQPRELVADDATNTVYISGIGKDSVIWVVDGENIKLKTAIQNTGKMSTGLALDSKGKRLYTTNADGELITIDTADNKILSRKKLLDDGKEHFFINISLDTARQRAFITDSKAAEVLVVDTRNGNILAKVAAPESLAVLFNPARNEAYVTHRQAGKVSVIDAKSYKVVKTFDTPTHPNSLALSADGKTLYVSVKQKSTKQQEATQPDDVIRIAL

SEQ ID NO: 186 - DNA, 1062 bp, Escherichia coli
atgcatttacgtcatctgttttcattgcgcctgcgtggttcattactgttaggttcattgcttgttgcttcatcattcagtacgcaggccgcagaagaaatgctgcgtaaagcggtaggtaaaggtgcctacgaaatggcttatagccagcaagaaaacgcgctgtggctcgccacttcgcaaagccgcaaactggataaaggcggcgtggtttatcgtcttgatccggtcactctggaagtgacgcaggcgatccataacgatctcaagccgtttggtgccaccatcaataacacgactcagacgttgtggtttggtaacaccgtaaacagcgcggtcacggcgatagatgccaaaactggcgaggtgaaaggccgtctggtgctggatgatcgtaagcgcacggaagaggtgcgcccgctgcaaccgcgtgagctggtagctgatgatgccacgaacaccgtttacatcagtggtattggtaaagatagcgtgatttgggtcgttgatggcgagaatatcaaactgaaaaccgccatccagaacaccggtaaaatgagtaccggtctggcactggatagcaaaggcaaacgtctttacaccactaacgctgacggcgaattgattaccatcgacaccgccgacaataaaatcctcagccgtaaaaagctgctggatgacggcaaagagcacttctttatcaacatcagccttgataccgccaggcagcgtgcatttatcaccgattctaaagcggcagaagtgttagtggtcgatacccgtaatggcaatattctggcgaaggttgcggcaccggaatcactggctgtgctgtttaacccagcgcgtaatgaagcctacgtaacgcatcgtcaggcaggtaaagtcagtgtgattgacgcgaaaagctataaagtggtgaaaacgttcgatacgccgactcatccgaacagcctggcgctgtctgccgatggcaaaacgctgtatgtcagtgtgaaacaaaaatccactaaacagcaggaagctacccagccagacgatgtgattcgtattgcgctgtaa

SEQ ID NO: 187 - protein, 271 aa, Escherichia coli
MAFKFKTFAAVGALIGSLALVGCGQDEKDPNHIKVGVIVGAEQQVAEVAQKVAKDKYGLDVELVTFNDYVLPNEALSKGDIDANAFQHKPYLDQQLKDRGYKLVAVGNTFVYPIAGYSKKIKSLDELQDGSQVAVPNDPTNLGRSLLLLQKVGLIKLKDGVGLLPTVLDVVENPKNLKIVELEAPQLPRSLDDAQIALAVINTTYASQIGLTPAKNGIFVEDKDSPYVNLIVTREDNKDAENVKKFVQAYQSDEVYEAANKVFNGGAVKGW

SEQ ID NO: 188 - DNA, 816 bp, Escherichia coli
atggcgttcaaattcaaaacctttgcggcagtgggagccctgattggatcactggcactggtaggctgcggtcaggatgaaaaagatccaaaccacattaaagtcggcgtgattgttggtgccgaacagcaggttgcagaagtcgcgcagaaagttgcgaaagacaaatatggcctggacgttgagctggtaaccttcaacgactatgttctgccaaacgaagcattgagcaaaggcgatatcgacgccaacgccttccagcataaaccgtaccttgatcagcaactgaaagatcgtggctacaaactggtcgcagtaggcaacacttttgtttatccgattgctggttactccaagaaaatcaaatcactggatgaactgcaggatggttcgcaggttgccgtgccaaacgatccaactaaccttggtcgttcactgctgctgctgcaaaaagtgggcttgatcaaactgaaagatggcgttggcctgctgccgaccgttcttgatgttgttgagaacccaaaaaatctgaaaattgttgaactggaagcaccgcaactgccgcgttctctggacgacgcgcaaatcgctctggcagttattaacaccacctatgccagccagattggcctgactccagcgaaaaacggtatctttgtcgaagataaagactccccgtacgtaaacctgatcgtaacgcgtgaagataacaaagacgccgagaacgtgaagaaattcgtccaggcttatcagtctgacgaagtttacgaagcagcaaacaaagtgtttaacggcggcgctgttaaaggctggtaa

SEQ ID NO: 189 - protein, 588 aa, Escherichia coli
  misc_feature (255)..(255): Xaa can be any naturally occurring amino acid
MKLPVREFDAVVIGAGGAGMRAALQISQSGQTCALLSKVFPTRSHTVSAQGGITVALGNTHEDNWEWHMYDTVKGSDYIGDQDAIEYMCKTGPEAILELEHMGLPFSRLDDGRIYQRPFGGQSKNFGGEQAARTAAAADRTGHALLHTLYQQNLKNHTTIFSEWYALDLVKNQDGAVVGCTALCIETGEVVYFKARATVLATGGAGRIYQSTTNAHINTGDGVGMAIRAGVPVQDMEMWQFHPTGIAGAGVLVTXGCRGEGGYLLNKHGERFMERYAPNAKDLAGRDVVARSIMIEIREGRGCDGPWGPHAKLKLDHLGKEVLESRLPGILELSRTFAHVDPVKEPIPVIPTCHYMMGGIPTKVTGQALTVNEKGEDVVVPGLFAVGEIACVSVHGANRLGGNSLLDLVVFGRAAGLHLQESIAEQGALRDASESDVEASLDRLNRWNNNRNGEDPVAIRKALQECMQHNFSVFREGDAMAKGLEQLKVIRERLKNARLDDTSSEFNTQRVECLELDNLMETAYATAVSANFRTESRGAHSRFDFPDRDDENWLCHSLYLPESESMTRRSVNMEPKLRPAFPPKIRTY

SEQ ID NO: 190 - DNA, 1767 bp, Escherichia coli
atgaaattgccagtcagagaatttgatgcagttgtgattggtgccggcggcgcaggtatgcgcgcggcgctgcaaatttcccagagcggccagacctgtgcgctgctctctaaagtcttcccgacccgttcccataccgtttctgcgcaaggcggcattaccgttgcgctgggtaatacccatgaagataactgggaatggcatatgtacgacaccgtgaaagggtcggactatatcggtgaccaggacgcgattgaatatatgtgtaaaaccgggccggaagcgattctggaactcgaacacatgggcctgccgttctcgcgtctcgatgatggtcgtatctatcaacgtccgtttggcggtcagtcgaaaaacttcggcggcgagcaggcggcacgcactgcggcagcggctgaccgtaccggtcacgcactgttgcacacgctttatcagcagaacctgaaaaaccacaccaccattttctccgagtggtatgcgctggatctggtgaaaaaccaggatggcgcggtggtgggttgtaccgcactgtgcatcgaaaccggtgaagtggtttattttaaagcccgcgctaccgtgctggcgactggcggagcagggcgtatttatcagtctaccactaacgcccacattaacaccggcgacggcgtcggcatggctatccgcgcaggcgtaccggtgcaggatatggaaatgtggcaattccacccgaccggcattgccggtgcgggcgtactggtcacckmaggttgccgtggtgaaggcggttatctgctgaacaaacatggcgaacgctttatggagcgttatgcgccgaacgccaaagacctggcgggccgtgatgtggtggcgcgttcaatcatgattgaaatccgtgaaggtcgcggctgtgatggtccgtgggggccacacgcgaaactgaaactcgatcacctgggtaaagaagttctcgaatcccgtctgccgggtatcctggagctttcccgtaccttcgctcacgttgatccggtgaaagagccgattccggttatcccaacctgtcactacatgatgggcggtattccgaccaaagttaccggtcaggcgctgactgtgaatgagaaaggcgaagatgtggttgttccggggctgttcgcggtaggtgaaattgcctgcgtatcggtacacggtgctaaccgtctgggcggcaactcgctgctggacctggtggtctttggtcgcgcagcgggtctgcatctgcaagagtctatcgccgagcagggcgcattgcgcgatgccagcgagtctgatgttgaagcatctttggatcgtctgaaccgctggaacaataatcgtaacggtgaagatccggtggcgattcgtaaagcgctgcaagaatgtatgcagcataacttctcggtcttccgtgaaggtgatgcgatggctaaagggcttgagcagttgaaagtgatccgcgagcgtctgaaaaatgcccgtctggatgacacttccagcgagttcaacacccagcgcgttgagtgcctggaactggataacctgatggaaacggcgtatgcaacggctgtttctgccaacttccgtaccgaaagccgtggcgcacatagccgcttcgacttcccggatcgtgatgatgaaaactggctgtgccactccctgtatctgccagagtcggaatccatgacgcgccgaagcgtcaacatggaaccgaaactgcgcccggcattcccgccgaagattcgtacttactaa

SEQ ID NO: 191 - protein, 535 aa, Escherichia coli
  misc_feature (349)..(349): Xaa can be any naturally occurring amino acid
MRISLKKSGMLKLGLSLVAMTVAASVQAKTLVYCSEGSPEGFNPQLFTSGTTYDASSVPLYNRLVEFKIGTTEVIPGLAEKWEVSEDGKTYTFHLRKGVKWHDNKEFKPTREMNADDVVFSFDRQKNAQNPYHKVSGGSYEYFEGMGLPELISEVKKVDDNTVQFVLTRPEAPFLADLAMDFASILSKEYADAMMKAGTPEKLDLNPIGTGPFQLQQYQKDSRIRYKAFDGYWGTKPQIDTLVFSITPDASVRYAKLQKNECQVMPYPNPADIARMKQDKSINLMEMPGLNVGYLSYNVQKKPLDDVKVRQALTYAVNKDAIIKAVYQGAGVSAKNLIPPTMWGYNDDXQDYTYDPEKAKALLKEAGLEKGFSIDLWAMPVQRPYNPNARRMAEMIQADWAKVGVQAKIVTYEWGEYLKRAKDGEHQTVMMGWTGDNGDPDNFFATLFSCAASEQGSNYSKWCYKPFEDLIQPARATDDHNKRVELYKQAQVVMHDQAPALIIAHSTVFEPVRKEVKGYVVDPLGKHHFENVSIE

SEQ ID NO: 192 - DNA, 1608 bp, Escherichia coli
atgcgtatttccttgaaaaagtcagggatgctgaagcttggtctcagcctggtggctatgaccgtcgcagcaagtgttcaggctaaaactctggtttattgctcagaaggatctccggaagggtttaacccgcagctgtttacctccggtaccacctatgacgcctcttccgtaccgctttataaccgcctagttgaatttaaaatcggcaccaccgaagtgattccgggcctcgctgaaaagtgggaagtcagcgaagacggtaaaacctataccttccatctgcgtaaaggtgtgaagtggcacgacaataaagaattcaaaccgacgcgcgaaatgaatgccgatgacgtggtgttctcgttcgatcgtcagaaaaacgcgcaaaacccgtaccataaagtttctggcggcagctacgaatacttcgaaggcatgggcttgccggagctgatcagcgaagtgaaaaaggtggacgacaacaccgttcagtttgtgctgactcgcccggaagcgccgttcctcgctgacctggcaatggacttcgcctctattctgtcaaaagaatatgctgatgcgatgatgaaagccggtacaccggaaaaactggacctcaacccaatcggcaccggtccgttccagttacagcagtatcaaaaagattcccgtatccgctacaaagcgtttgatggctactggggcaccaaaccgcagatcgatacgctggttttctctattacccctgacgcttccgtgcgttacgctaaattgcagaaaaatgaatgccaggtgatgccgtacccgaacccggcagatatcgcccgcatgaagcaggataaatctatcaacctgatggaaatgccggggctgaacgtcggttatctctcgtataacgtgcagaaaaaaccactcgatgacgtgaaagttcgccaggctctgacctacgcggtgaacaaagacgcgatcatcaaagcggtttatcagggcgcgggtgtatcagcgaaaaacctgatcccgccaaccatgtggggctataacgacgacrttcaggactacacctacgatcctgaaaaagcgaaagccttgctgaaagaagcgggtctggaaaaaggtttctccatcgacctgtgggcgatgccggtacaacgtccgtataacccgaacgctcgccgcatggcggagatgattcaggcagactgggcgaaagtcggcgtgcaggccaaaattgtcacctacgaatggggtgagtacctcaagcgtgcgaaagatggcgagcaccagacggtaatgatgggctggactggcgataacggggatccggataacttcttcgccactctgttcagctgcgccgcctctgaacaaggctccaactactcaaaatggtgctacaaaccgtttgaagatctgattcaaccggcgcgtgctaccgacgaccataacaaacgcgttgaactgtacaagcaagcgcaggtggtgatgcacgatcaggctccggcactgatcatcgctcactccaccgtgtttgaaccggtacgcaaagaagttaaaggctatgtggttgatccattaggcaaacatcacttcgaaaacgtctctatcgaataa

SEQ ID NO: 193 - protein, 91 aa, Escherichia coli
MKIISKMLVGALAFAVTNVYAAELMTKAEFEKVESQYEKIGDISTSNEMSTADAKEDLIKKADEKGADVLVLTSGQTDNKIHGTADIYKKK

SEQ ID NO: 194 - DNA, 276 bp, Escherichia coli
atgaaaataatctctaaaatgttagtcggtgcgttagcgtttgccgttaccaatgtctatgccgctgaattgatgaccaaagcggaatttgaaaaagttgaatcgcagtatgaaaaaataggtgatatttcaaccagtaatgaaatgtcgactgcagatgcaaaagaagatttaatcaaaaaagccgatgaaaaaggggctgatgtgttggtactgacctccggtcaaactgacaataagatccacggcacggcggatatttataagaagaagtaa

SEQ ID NO: 195 - protein, 203 aa, Escherichia coli
MKVFTFLLIIMVCLYNFGVRAAMDNSKHSDEAEKLLAELSARKGEGEGEGEGEGEGEGEGEPKSTVSVFYLQPEEVNTLSHQAKRGDGEAGFRLFLYYKLSNYDEEKSSQWLKIAANNGHATAQYRLYVELQEQGETKEANEWLQKIKLAASNNDSSAIWFLVNCYKNQGNKKEALQWAYKLKASKQPLDADRLIEELTKEQK

SEQ ID NO: 196 - DNA, 612 bp, Escherichia coli
atgaaagtatttacttttttgttgattatcatggtatgtctttataactttggagtgagggctgctatggataactcaaaacattctgatgaggcggaaaaattattggcggagctttctgctagaaaaggtgaaggtgaaggtgaaggtgaaggtgaaggtgaaggtgaaggtgaaggtgaaccaaaatcaacagtaagcgtcttttatttgcagccagaagaagtaaatactttatcacaccaggcaaaacgaggcgatggcgaggcgggttttaggttgttcttgtactacaagttgtccaattatgatgaagaaaaaagtagtcagtggttaaaaatagcggctaataatggtcatgcgacagctcagtatcggttatatgtagagttacaagaacaaggtgaaaccaaggaagctaatgaatggttacaaaaaattaaattggctgccagtaataatgacagttcagcaatatggttcttggtgaattgttataaaaaccagggaaataaaaaagaagcattgcaatgggcatataaactcaaagcgagtaaacagccgcttgatgcagatcgactaattgaagaattaacgaaagaacaaaagtag

SEQ ID NO: 197 - protein, 201 aa, Escherichia coli; identical to SEQ ID NO: 109
  misc_feature (195)..(195): Xaa can be any naturally occurring amino acid

SEQ ID NO: 198 - DNA, 606 bp, Escherichia coli; identical to SEQ ID NO: 110

SEQ ID NO: 199 - protein, 216 aa, Escherichia coli
MAIRLHKLAVALGVFIVSAPAFSHGHHSHGKPLTEVEQKAANGVFDDANVQNRTLSDWDGVWQSVYPLLQSGKLAPVFQKKADADKTKTFAEIKDYYHKGYATDIEMIGIEDGIVEFHRNNETTSCKYDYDGYKILTYKSGKKGVRYLFECKDPESKAPKYIQFSDHIIAPRKSSHFHIFMGNDSQQSLLNEMENWPTYYPYQLSSEEVVEEMMSH

SEQ ID NO: 200 - DNA, 651 bp, Escherichia coli
ttggcgattcgtcttcacaaactggctgttgctttaggtgtctttattgttagcgctcctgccttttcgcatggtcatcactcacacggcaaacccttaacagaggtcgaacaaaaagctgctaatggtgtttttgatgatgccaatgtacaaaaccgaacgctcagtgactgggatggagtctggcaatccgtttatcctttactgcaaagtggcaaacttgcccccgtctttcagaagaaagcggatgcagataaaactaaaacatttgctgaaattaaagattattatcacaaaggctatgcaacagatatcgagatgattggcattgaggacggcattgttgaattccatagaaataatgaaacaacatcctgtaaatatgattacgatggatacaaaatactcacctataaatcaggcaagaaaggcgttcgttacttattcgaatgtaaagatcctgaaagcaaagcccctaaatatatacaatttagcgatcatataattgcaccacgaaaatcatctcattttcacatttttatgggtaatgattcacagcaatctttattaaatgaaatggaaaactggccaacgtattatccatatcagttgagtagcgaagaagtggtcgaggaaatgatgtctcattga

SEQ ID NO: 201 - protein, 260 aa, Escherichia coli
MKKSILALSLLVGISAAASSYAALPETVRIGTDTTYAPFSSKDAKGDFVGFDIDLGNEMCKRMQVKCTWVASDFDALIPSLKAKKIDAIISSLSITDKRQQEIAFSDKLYAADSRLIAAKGSPIQPTLDSLKGKHVGVLQGSTQEAYANETWRSKGVDVVAYANQDLVYSDLAAGRLDAALQDEVAASEGFLKQPAGKDFAFAGSSVKDKKYFGDGTGVGLRKDDAELTAAFNKALGELRQDGTYDKMAKKYFDFNVYGD

SEQ ID NO: 202 - DNA, 783 bp, Escherichia coli
atgaagaagtcgattctcgctctgtctttgttagtcggtatttccgcagcggcttccagctatgcggcattgccggagacggtacgtatcggaaccgataccacctatgcaccgttctcgtcgaaagatgccaaaggtgactttgtcggctttgatatcgatctcggtaacgagatgtgcaaacggatgcaggtgaaatgtacctgggttgccagtgactttgacgcgctgatcccctcactgaaagcgaaaaaaatcgacgccattatttcgtcgctttccattaccgataaacgtcagcaggagattgccttctccgacaagctgtacgccgcagattcccgtctgattgccgccaaaggttcgccgattcagccaacgctggactcactgaaaggtaaacatgttggtgtgctgcagggatcaacccaggaagcttacgctaacgagacctggcgtagcaaaggtgtggatgtggtggcctatgccaaccaggatttggtctattccgatctggctgcaggacgtctggatgctgcactgcaggatgaagttgctgccagcgaaggattcctcaagcaacctgctggtaaagatttcgcctttgctggctcatcagtaaaagacaaaaaatacttcggtgatggcaccggtgtagggctacgtaaagatgatgctgaactgacggctgccttcaataaggcgcttggcgagctgcgtcaggacggcacctacgacaagatggcgaaaaagtattttgactttaatgtctacggtgactga

SEQ ID NO: 203 - protein, 511 aa, Escherichia coli
MATLVQTGKAKQLTLLGFFAITASMVMAVYEYPTFATSGFSLVFFLLLGGILWFIPVGLCAAEMATVDGWEEGGVFAWVSNTLGPRWGFAAISFGYLQIAIGFIPMLYFVLGALSYILKWPALNEDPITKTIAALIILWALALTQFGGTKYTARIAKVGFFAGILLPAFILIALAAIYLHSGAPVAIEMDSKTFFPDFSKVGTLVVFVAFILSYMGVEASATHVNEMSNPGRDYPLAMLLLMVAAICLSSVGGLSIAMVIPGNEINLSAGVMQTFTVLMSHVAPEIEWTVRVISALLLLGVLAEIASWIVGPSRGMYVTAQKNLLPAAFAKMNKNGVPVTLVISQLVITSIALIILTNTGGGNNMSFLIALALTVVIYLCAYFMLFIGYIVLVLKHPDLKRTFNIPGGKGVKLVVAIVGLLTSIMAFIVSFLPPDNIQGDSTDMYVELLVVSFLVVLALPFILYAVHDRKGKANTGVTLEPINSQNAPKGHFFLHPRARSPHYIVMNDKKH

SEQ ID NO: 204 - DNA, 1536 bp, Escherichia coli
atggctacattagtacagacaggtaaagctaagcagctcacattactcggcttttttgccataacggcatcgatggtaatggctgtttatgaataccctaccttcgcaacatcgggcttttcattagtcttcttcctgctattaggcgggattttatggtttattcccgtgggactttgtgctgcggaaatggccaccgtcgacggctgggaagaaggtggtgtcttcgcctgggtatcaaatactctggggccgagatggggatttgcagcgatctcatttggctatctgcaaatcgccattggttttattccgatgctctatttcgtgttaggggcactctcctacatcctgaaatggccagcgctgaatgaagaccccattaccaaaactattgcagcactcatcattctttgggcgctggcattaacgcagtttggtggcacgaaatacacggcgcgaattgctaaagttggcttcttcgccggtatcctgttacctgcatttattttgattgcattagcggctatttatctgcactccggtgcccccgttgctatcgaaatggattcgaagaccttcttccctgacttctctaaagtgggcaccctggttgtatttgttgccttcattttgagttatatgggcgtagaagcttccgcaacccacgtcaatgaaatgagtaacccagggcgcgactatccactggctatgttactgctgatggtggcggcaatctgcttaagctctgttggcggtttgtctattgcgatggtcattccgggtaatgaaatcaacctctccgcaggggtaatgcaaacctttaccgttctgatgtcccatgtggcaccggaaattgagtggacggttcgcgtgatctccgcactgctgttgctgggtgttctggcggaaatcgcctcctggattgttggtccttctcgcgggatgtatgtcacagcgcagaaaaacctgctgccagcggcattcgctaaaatgaacaaaaatggcgtaccggtaacgctggtcatttcgcagctggtgattacttctatcgcgttgatcatcctcaccaataccggtggcggtaacaacatgtccttcctgatcgcactggcgctgacggtggtgatttatctgtgtgcttatttcatgctgtttattggctacattgtgttggttcttaaacatcctgacttaaaacgcacatttaatatccctggtggtaaaggggtgaaactggtcgtggcaattgtcggtctgctgacttcaattatggcgtttattgtttccttcctgccgccggataacatccagggtgactctaccgatatgtatgttgaattactggtcgttagtttcctggtggtacttgccctgccctttattctctatgctgttcatgatcgtaaaggcaaagcgaataccggcgtcactctggagccaatcaacagtcagaacgcaccaaaaggtcacttcttcctgcacccgcgtgcacgttcaccacactatattgtgatgaatgacaagaaacactaa

SEQ ID NO: 205 - protein, 222 aa, Escherichia coli [sequence omitted]

SEQ ID NO: 206 - DNA, 669 bp, Escherichia coli
atgggtattttttctcgctttgccgacatcgtgaatgccaacatcaacgctctgttagagaaagcggaagatccacagaaactggtgcgtctgatgatccaggagatggaagatacattggttgaagtacgttctacttcggcgcgtgcgctggcagaaaagaaacagctgactcgccgtattgaacaagcgtcggcgcgtgaagttgaatggcaggaaaaagccgaactggcgctgctgaaagagagagaggatttggcgcgtgcggcgttaattgaaaaacagaaactgaccgatctgattaagtccctggaacatgaagtgacgctggtggacgatacgctggcacgcatgaagaaagagattggcgagctggaaaacaaattgagcgaaacacgcgctcgccagcaggcattgatgttacgccatcaggcggcaaactcgtcgcgcgatgtgcgtcgtcagctggacagtggcaaactggatgaagcaatggctcgtttcgaatctttcgaacgtcgtattgaccagatggaagcggaagcagaaagccacagcttcggtaaacaaaaatcgctggacgatcagtttgccgaactgaaagccgatgatgcaatcagcgagcaactggcacaattaaaagccaaaatgaagcaagacaatcaataa

SEQ ID NO: 207 - protein, 391 aa, Escherichia coli; identical to SEQ ID NO: 43
  misc_feature (331)..(331): Xaa can be any naturally occurring amino acid

SEQ ID NO: 208 - DNA, 1176 bp, Escherichia coli; identical to SEQ ID NO: 44

SEQ ID NO: 209 - protein, 323 aa, Escherichia coli
MSKIFEDNSLTIGHTPLVRLNRIGNGRILAKVESRNPSFSVKCRIGANMIWDAEKRGVLKPGVELVEPTSGNTGIALAYVAAARGYKLTLTMPETMSIERRKLLKALGANLVLTEGAKGMKGAIQKAEEIVASNPEKYLLLQQFSNPANPEIHEKTTGPEIWEDTDGQVDVFIAGVGTGGTLTGVSRYIKGTKGKTDLISVAVEPTDSPVIAQALAGEEIKPGPHKIQGIGAGFIPANLDLKLVDKVIGITNEEAISTARRLMEEEGILAGISSGAAVAAALKLQEDESFTNKNIVVILPSSGERYLSTALFADLFTEKELQQ

SEQ ID NO: 210 - DNA, 972 bp, Escherichia coli
atgagtaagatttttgaagataactcgctgactatcggtcacacgccgctggttcgcctgaatcgcatcggtaacggacgcattctggcgaaggtggaatctcgtaaccccagcttcagcgttaagtgccgtatcggtgccaacatgatttgggatgccgaaaagcgcggcgtgctgaaaccaggcgttgaactggttgaaccaaccagcggtaataccgggattgcactggcctatgtagctgccgctcgcggttacaaactcaccctgaccatgccagaaaccatgagtattgaacgccgcaagctgctgaaagcgttaggtgcaaacctggtgctgaccgaaggtgctaaaggcatgaaaggcgcaatccaaaaagcagaagaaattgtcgccagcaatccagagaaatacctgctgctgcaacaattcagcaatccggcaaaccctgaaattcacgaaaagaccaccggtccggagatctgggaagataccgacggtcaggttgatgtatttattgctggcgttgggactggcggtacgctgactggcgtcagccgctacattaaaggcaccaaaggtaagaccgatcttatctctgtcgccgttgagccaaccgattctccagttatcgcccaggcgctggcaggtgaagagattaaacctggcccgcataaaattcagggtattggcgctggttttatcccggctaacctcgatctcaagctggtcgataaagtcattggcatcaccaatgaagaagcgatttctaccgcgcgtcgtctgatggaagaagaaggtattcttgcaggtatctcttctggagcagctgttgctgcggcgttgaaactacaagaagatgaaagctttaccaacaagaatattgtggttattctaccgtcatcgggtgagcgttatttaagcaccgcattgtttgccgatctcttcactgagaaagaattgcaacagtaa

SEQ ID NO: 211 - protein, 245 aa, Escherichia coli
MKNVGDLMQRLQKMMPAHIKPAFKTGEELLAWQKEQGAIRSAALERENRAMKMQRTFNRSGIRPLHQNCSFENYRVECEGQMNALSKARQYVEEFDGNIASFIFSGKPGTGKNHLAAAICNELLLRGKSVLIITVADIMSAMKDTFRNSGTSEEQLLNDLSNVDLLVIDEIGVQTESKYEKVIINQIVDRRSSSKRPTGMLTNSNMEEMTKLLGERVMDRMRLGNSLWVIFNWDSYRSRVTGKEY

SEQ ID NO: 212 - DNA, 738 bp, Escherichia coli
atgaaaaacgttggcgacctgatgcaacgcctgcaaaaaatgatgcctgcccatatcaaacctgcattcaaaacgggtgaagagctactggcctggcagaaagaacaaggggcgatccgctccgccgctctcgaacgtgaaaatcgggcgatgaaaatgcagcgcacctttaaccgctccggtattcgcccactgcatcagaactgctcctttgagaactatcgcgttgagtgtgaagggcagatgaatgcgttaagcaaagcgcgccagtatgtcgaagagtttgacggcaacatcgccagcttcatcttttctggtaagccaggaaccggcaaaaaccatctggcggcggcaatctgcaacgagctgctgctacgcggtaaatccgtattgatcatcaccgtggccgatattatgtcggcgatgaaagataccttcaggaatagcggtaccagcgaagaacaactgcttaacgatctgagcaacgttgatctgctggtgatcgatgagatcggcgtgcagaccgaatcgaaatacgaaaaagtgatcatcaaccagatcgtcgatcgccgctcttcttccaaacgcccaaccgggatgctgaccaacagtaatatggaagagatgaccaagttgctgggcgaacgcgtgatggaccgtatgcgcctgggtaacagtttgtgggtgatcttcaactgggatagctaccgtagccgtgtaacaggtaaagagtattaa

SEQ ID NO: 213 - protein, 176 aa, Escherichia coli
  misc_feature (158)..(158): Xaa can be any naturally occurring amino acid
MLRFLNQCSQGRGAWLLMAFTALALELTALWFQHVMLLKPCVLCIYERCALFGVLGAALIGAIAPKTPLRYVAMVIWLYSAFRGVQLTYEHTMLQLYPSPFATCDFMVRFPEWLPLDKWVPQVFVASGDCAERQWDFLGLEMPQWLLGIFIAYLIVAXLVVISQPFKAKKRDLFGR

SEQ ID NO: 214 - DNA, 531 bp, Escherichia coli
atgttacgatttttgaaccaatgttcacaaggccggggcgcgtggctgttgatggcgtttactgctctggcactggaactgacggcgctgtggttccagcatgtgatgttactgaaaccttgcgtgctctgtatttatgaacgctgcgcattattcggcgttctgggtgctgcgctgattggcgcgatcgccccaaaaacgccactgcgttatgtagcgatggttatctggttgtatagtgcgttccgcggtgtgcagttaacttacgagcacaccatgcttcagctctatccttcgccgtttgccacctgtgattttatggttcgtttcccggaatggctgccgctggataaatgggtgccgcaagtgtttgtcgcctctggcgattgcgccgagcgtcagtgggattttttaggtctggaaatgccgcagtggctgctcggtatttttatcgcttacctgattgtcgcggkgctggtggtgatttcccagccgtttaaagcgaaaaaacgtgacctgttcggtcgctaa

SEQ ID NO: 215 - protein, 101 aa, Escherichia coli
MSNQFGDTRIDDDLTLLSETLEEVLRSSGDPADQKYVELKARAEKALDDVKKRVSQASDSYYYRAKQAVYRADDYVHEKPWQGIGVGAAVGLVLGLLLARR

SEQ ID NO: 216 - DNA, 306 bp, Escherichia coli
atgtctaatcagtttggtgatacacgtatcgatgacgacctgacgctgcttagtgaaacactggaagaggtgctccgctcctctggcgatcccgccgatcagaaatatgttgagctgaaagcgcgtgcagaaaaagcgctggatgatgtgaaaaaacgggttagccaggcttcagacagttattactatcgggcgaagcaggctgtttatcgtgctgatgactacgtccacgaaaaaccctggcagggaattggtgtgggtgcggccgttgggctggtactaggactgttgctggcacgccgttaa

SEQ ID NO: 217 - protein, 346 aa, Escherichia coli
MKSVVNDTDGIVRVAESVIPEIKHQDEVRVKIASSGLCGSDLPRIFKNGAHYYPITLGHEFSGYIDAVGSGVDDLHPGDAVACVPLLPCFTCPECLKGFYSQCAKYDFIGSRRDGGFAEYIVVKRKNVFALPTDMPIEDGAFIEPITVGLHAFHLAQGCENKNVIIIGAGTIGLLAIQCAVALGAKSVTAIDISSEKLALAKSFGAMQTFNSSEMSAPQMQSVLRELRFNQLILETAGVPQTVELAVEIAGPHAQLALVGTLHQDLHLTSATFGKILRKELTVIGSWMNYSSPWPGQEWETASRLLTERKLSLEPLIAHRGSFESFAQAVRDIARNAMPGKVLLIP

SEQ ID NO: 218 - DNA, 1041 bp, Escherichia coli
atgaaatcagtggtgaatgatactgatggtatcgtgcgcgttgcagaaagcgtcattcctgaaattaaacatcaggatgaggtgcgggtaaaaattgccagctcgggcttatgtggttccgatttacccaggatatttaaaaatggtgcacattattatccaataacgttaggccatgaatttagcggctatattgatgcggtaggatccggtgttgatgatttacaccctggcgatgcggttgcctgtgtgccgttattaccctgttttacttgtccagagtgtttgaaagggttttattcccagtgcgcaaaatatgattttattggctcacggcgtgatggtggatttgccgaatatattgtcgttaagcgaaaaaatgtctttgctctacccacggatatgcctattgaggatggggcttttattgagccgattaccgttggcctgcatgcttttcatttagcgcaaggttgtgagaataaaaacgttattattattggtgccggaaccattggcctgctggctattcagtgcgctgtcgcgctgggagcaaagagtgtgacggctatcgacattagctcagaaaaactggcactggcaaaatctttcggtgcgatgcaaacatttaacagtagcgaaatgagcgcgccgcaaatgcagagcgttttacgcgaactgcgctttaatcagcttatcctcgagacggctggcgtaccgcaaactgtcgaactggcggtagagattgccggtcctcatgcccaactggcactggtgggcacgttgcatcaggatctgcatttaacatcggcaacgtttggcaaaatattgcgtaaagagctgacggttatcggcagttggatgaactactccagcccttggccggggcaggagtgggaaacggcgagccggttgctgacagaacgtaagttaagcctggagccattaatcgctcaccgtggaagctttgaaagcttcgcccaggcggtgcgtgacatcgctcgtaatgctatgccgggcaaagtgttgctcattccctga

SEQ ID NO: 219 - protein, 620 aa, Escherichia coli; identical to SEQ ID NO: 91
  misc_feature (143)..(143): Xaa can be any naturally occurring amino acid

SEQ ID NO: 220 - DNA, 1863 bp, Escherichia coli; identical to SEQ ID NO: 92

SEQ ID NO: 221 - protein, 265 aa, Escherichia coli
MHWVISPTLISNINSPGGDVFEGIAIFNALKNQGATITVYVDGVAASMASVIAMAGDTVIMPENAFMMIHKPWGFSGGDAEDMRSYADLLDKVESVLLPAYAQKTGKTTDEIAAMLADETWMSGAECLAHGFADQVTPAVEAMACIQSKRTEEFKKMPESIRNMITPPRNSAPRDTTVTIPAPAVTEPSPVPAVSDEATIRARVMAEQKARMSGINDLFAMFGGRYQTLQAQCVADPDCSLEMARERLLNEMGEPPRVSWRVFYL

SEQ ID NO: 222 - DNA, 798 bp, Escherichia coli
  misc_feature (552)..(552): n is a, c, g, or t
atgcactgggtgatatcacccacattaatctccaatatcaattcaccgggtggcgatgtctttgaaggcatcgccatttttaatgccctgaaaaatcagggggcgaccattaccgtgtatgtggatggcgttgccgcctcgatggcatctgtgattgcgatggccggtgatacggtcattatgccggaaaatgccttcatgatgatccataagccatggggattcagtggcggggatgctgaggatatgcgcagttatgccgatttgctggataaagtcgaatcggtactgttgccagcctatgcgcagaaaaccggaaaaaccaccgatgaaattgccgccatgctggcggatgaaacctggatgtccggtgccgaatgtctggcacacggatttgctgaccaggtgacacccgctgttgaggcaatggcatgtattcagtcaaaacgtacagaggaatttaaaaagatgccggaatccatccgaaacatgattactccgccacgcaacagtgccccgcgtgataccacagtgacaatccctgcaccggcngtaacagaaccatcaccggtaccggcagtgtctgatgaggcgaccattcgcgcccgcgttatggctgagcagaaagcccgcatgtcaggcattaacgatctgtttgccatgttcggcggtcgctatcagacgcttcaggcacagtgcgtggctgatcctgactgttcgctggaaatggcccgtgaacgtctgctgaatgaaatgggtgaaccgccccgggtttcctggagagtgttttatctgtga

SEQ ID NO: 223 - protein, 420 aa, Escherichia coli
  misc_feature (314)..(314): Xaa can be any naturally occurring amino acid
MKTLIARHKAGEHIGICSVCSAHPLVIEAALAFDRNSTRKVLIEATSNQVNQFGGYTGMTPADFREFVFAIADKVGFARERIILGGDHLGPNCWQQENVDAAMEKSVELVKAYVRAGFSKIHLDASMSCAGDPIPLAPETVAERAAVLCFAAESVATDCQREQLSYVIGTEVPVPGGEASAIQSVHITHVEDAANTLRTHQKAFIARGLTEALTRVIAIVVQPGVEFDHSNIIHYQPQEAQALAQWIENTRMVYEAHSTDYQTRTAYWELVRDHFAILKVGPALTFALREAIFALAQIEQELIAPENRSGCLAXIEEVMLDEPQYWKKYYRTGFNDSLLDIRYSLSDRIRYYWPHSRIKNSVETMMVNLQGVDIPLGMISQYLPKQFERIQSGELSAIPHQLIMDKIYDVLRAYRYGCAE

SEQ ID NO: 224 - DNA, 1263 bp, Escherichia coli
atgaaaacgttaattgcccggcataaagctggtgaacatatcggcatatgttcagtctgttctgcccatccgttggttatcgaagcggcgctggcatttgatcgcaacagcacgcgcaaagtgctgattgaagcaacgtcaaaccaggtcaatcaatttggcggttataccggaatgacaccggcagactttcgcgaatttgtttttgcgattgccgataaagtcggatttgcacgcgagcgtattattctcggcggtgaccatctggggccaaactgctggcagcaagaaaatgtggatgcggcgatggaaaaatccgtcgagctggtaaaggcatatgttcgtgctggcttcagtaaaattcatcttgatgcgtcaatgtcctgcgcgggggatcccataccgttagcaccagaaacggttgcggaacgagctgctgtgctttgctttgctgcggaaagtgtggcgacagattgccagcgtgagcaactgagctatgtcattggcaccgaagttccggttccgggcggtgaggccagcgccattcagtcagtacacatcacccatgttgaagatgccgccaatactttacgtacgcatcaaaaggcctttattgcccgtgggctgacagaggcattaacacgcgtgattgccatcgtggtgcagccgggtgtggaatttgatcacagcaatattatccattatcagccgcaggaagcgcaggcgctggcgcaatggatagaaaatacccgaatggtttatgaagcacattctaccgattaccagacccggacggcttattgggaattagtccgcgatcactttgcaatattgaaagtcggtcccgcattaacctttgctttacgtgaggcgatatttgcgctggcgcaaattgagcaggaacttatcgcccccgaaaatcgcagcggttgcctggcggyaattgaagaagtgatgctcgacgaaccgcaatactggaaaaaatattatcgcacgggttttaacgattcattactggatattcgttacagcctgtcggatcgtattcgttattactggccgcatagtcggattaaaaatagcgttgaaacgatgatggtgaatctgcaaggcgtggacatcccactgggcatgattagtcagtatcttcccaaacaatttgaacgcattcagtccggggaattatcagcaataccgcatcagctgattatggataaaatttatgatgttttgcgcgcctatcgctacggctgtgcggaataa

SEQ ID NO: 225 - protein, 865 aa, Escherichia coli
MLEEYRKHVAERAAEGIAPKPLDANQMAALVELLKNPPAGEEEFLLDLLTNRVPPGVDEAAYVKAGFLAAVAKGEAKSPLLTPEKAIELLGTMQGGYNIHPLIDALDDAKLAPIAAKALSHTLLMFDNFYDVEEKAKAGNEYAKQVMQSWADAEWFLNRPALAEKLTVTVFKVTGETNTDDLSPAPDAWSRPDIPLHALAMLKNAREGIEPDQPGVVGPIKQIEALQQKGFPLAYVGDVVGTGSSRKSATNSVLWFMGDDIPHVPNKRGGGLCLGGKIAPIFFNTMEDAGALPIEVDVSNLNMGDVIDVYPYKGEVRNHETGELLATFELKTDVLIDEVRAGGRIPLIIGRGLTTKAREALGLPHSDVFRQAKDVAESDRGFSLAQKMVGRACGVKGIRPGAYCEPKMTSVGSQDTTGPMTRDELKDLACLGFSADLVMQSFCHTAAYPKPVDVNTHHTLPDFIMNRGGVSLRPGDGVIHSWLNRMLLPDTVGTGGDSHTRFPIGISFPAGSGLVAFAAATGVMPLDMPESVLVRFKGKMQPGITLRDLVHAIPLYAIKQGLLTVEKKGKKNIFSGRILEIEGLPDLKVEQAFELTDASAERSAAGCTIKLNKEPIIEYLNSNIVLLKWMIAEGYGDRRTLERRIQGMEKWLANPELLEADADAEYAAVIDIDLADIKEPILCAPNDPDDARPLSAVQGEKIDEVFIGSCMTNIGHFRAAGKLLDAHKGQLPTRLWVAPPTRMDAAQLTEEGYYSVFGKSGARIEIPGCSLCMGNQARVADGATVVSTSTRNFPNRLGTGANVFLASAELAAVAALIGKLPTPEEYQTYVAQVDKTAVDTYRYLNFNQLSQYTEKADGVIFQTAV

SEQ ID NO: 226 - DNA, 2598 bp, Escherichia coli
gtgctagaagaataccgtaagcacgtagctgagcgtgccgctgaggggattgcgcccaaacccctggatgcaaaccaaatggccgcgcttgtagagctgctgaaaaacccgcccgcgggcgaagaagaattcctgttagatctgttaaccaaccgtgttcctcctggcgtcgatgaagccgcctatgttaaagcaggcttcctggctgctgtcgccaaaggcgaagccaaatccccactgctgactccggaaaaagccatcgaactgctgggtactatgcagggtggttacaacattcatccgctgatcgatgcgctggatgatgccaaactggcaccgatcgctgccaaagcactttctcacacactactgatgttcgataacttctatgacgtagaagagaaagcgaaagcaggcaacgaatatgcgaagcaggttatgcagtcctgggctgatgccgaatggttcctgaatcgcccggcgctggctgaaaaactgaccgttaccgtcttcaaagtcactggcgaaaccaacaccgatgacctttctccggcaccggatgcgtggtcacgcccggatatcccattgcacgcgctggcgatgctgaaaaacgcccgtgaaggtattgagccagaccagccaggtgttgttggcccgatcaaacagattgaagctctgcaacagaaaggtttcccgctggcgtacgtcggtgacgttgtgggtacgggttcatcgcgtaaatccgccacgaactccgttctgtggtttatgggcgatgatattccacatgtgccgaacaaacgcggcggtggtttgtgcctcggcggtaaaattgcacccatcttctttaacacgatggaagatgcgggtgcgctgccaatcgaagtggatgtctctaacctgaacatgggcgacgtaattgacgtttacccgtacaaaggtgaagtacgtaaccacgaaaccggcgaactgctggcgaccttcgaactgaaaaccgacgtgctgattgatgaagtgcgtgctggcggccgtattccgctgattatcggtcgtggcctgaccaccaaagcgcgtgaagcacttggtctgccgcacagtgatgtgttccgtcaggcgaaagatgtcgctgagagcgatcgcggcttctcgctggcgcagaaaatggtaggccgtgcctgtggcgtgaaaggcattcgtccgggcgcgtactgtgaaccgaaaatgacttctgtaggctctcaggacaccacaggcccgatgacccgtgatgaactgaaagacctggcgtgcctgggcttctcggctgacctggtgatgcagtctttctgccacaccgcggcgtatccgaagccagttgacgtgaacacgcaccacacgctgccggacttcattatgaaccgtggcggtgtgtcgctgcgtccgggtgacggcgtaatccactcctggctgaaccgtatgctgctgccggataccgtcggtaccggtggtgactcccatacccgtttcccgatcggtatctctttcccggcgggttctggtctggtggcatttgcagccgcaacaggcgtaatgccgctggatatgccggaatccgttctggtgcgcttcaaaggcaaaatgcagccgggcatcaccctgcgcgatctggtacacgccattccgctgtatgcgatcaaacaaggtctgctgaccgttgagaagaaaggcaagaaaaacatcttctctggccgcatcctagaaattgaaggtctgccggatctgaaagttgagcaggcctttgagctgaccgatgcgtccgccgagcgttctgctgccggttgtaccatcaagctgaacaaagaaccaatcatcgaatacctgaactccaacatcgtcctgctgaagtggatgatcgcggaaggttacggcgatcgtcgtaccctggaacgtcgtattcagggcatggaaaaatggctggcgaatcctgagctgctggaagccgatgcagatgcggaatacgcggcagtgatcgacatcgatctggcggatattaaagagccaatcctctgtgctccgaacgacccggacgacgcacgtccgctgtctgcggtacagggcgagaagatcgacgaagtgtttatcggttcttgcatgactaacatcggtcacttccgtgccgcaggtaaactgctggatgcgcacaaaggtcagttgccgacccgcctgtgggtggcaccgccaacccgtatggacgccgcacagttgaccgaagaaggctactacagcgtcttcggtaagagtggtgcgcgtatcgagatccctggctgttccctgtgtatgggtaaccaggcgcgtgtggcggacggtgcaacggtggtttccacctctacccgtaacttcccgaaccgtctgggtactggcgcgaatgtcttcctggcttctgcggaactggctgctgttgcggcgctgattggcaaactgccgacgccggaagagtaccagacctacgtggcgcaggtagataaaacagccgttgatacttaccgttatctgaacttcaaccagctttctcagtacaccgagaaagccgatggggtgattttccagactgcggtttaa

SEQ ID NO: 227 - protein, 523 aa, Escherichia coli
MMLDIVELSRLQFALTAMYHFLFVPLTLGMAFLLAIMETVYVLSGKQIYKDMTKFWGKLFGINFALGVATGLTMEFQFGTNWSYYSHYVGDIFGAPLAIEGLMAFFLESTFVGLFFFGWDRLGKVQHMCVTWLVALGSNLSALWILVANGWMQNPIASDFNFETMRMEMVSFSELVLNPVAQVKFVHTVASGYVTGAMFILGISAWYMLKGRDFAFAKRSFAIAASFGMAAVLSVIVLGDESGYEMGDVQKTKLAAIEAEWETQPAPAAFTLFGIPDQEEETNKFAIQIPYALGIIATRSVDTPVIGLKELMVQHEERIRNGMKAYSLLEQLRSGSTDQAVRDQFNSMKKDLGYGLLLKRYTPNVADATEAQIQQATKDSIPRVAPLYFAFRIMVACGFLLLAIIALSFWSVIRNRIGEKKWLLRAALYGIPLPWIAVEAGWFVAEYGRQPWAIGEVLPTAVANSSLTAGDLIFSMVLICGLYTLFLVAELFLMFKFARLGPSSLKTGRYHFEQSSTTTQPAR

SEQ ID NO: 228 - DNA, 1572 bp, Escherichia coli
atgatgttagatatagtcgaactgtcgcgcttacagtttgccttgaccgcgatgtaccacttcctttttgtgccactgacgctcggtatggcgttcctgctggccattatggaaacggtctacgtcctttccggcaaacagatttataaagatatgaccaagttctggggcaagttgtttggtatcaacttcgctctgggtgtggctaccggtctgaccatggagttccagttcgggactaactggtcttactattcccactatgtaggggatatcttcggtgcgccgctggcaatcgaaggtctgatggccttcttcctcgaatccacctttgtaggtctgttcttcttcggttgggatcgtctgggtaaagttcagcatatgtgtgtcacctggctggtggcgctcggttcaaacctgtccgcactgtggattctggttgcgaacggctggatgcaaaacccaatcgcgtccgatttcaactttgaaactatgcgtatggagatggtgagcttctccgagctggtgcttaacccggttgctcaggtgaaattcgttcacactgtagcgtctggttatgtgactggcgcgatgttcatcctcggtatcagcgcatggtatatgctgaaaggtcgtgacttcgccttcgctaaacgctcctttgctatcgctgccagcttcggtatggctgccgttctgtctgttattgttctgggtgatgaatccggctacgaaatgggcgacgtgcagaaaaccaaactggctgctattgaagctgagtgggaaacgcaacctgcgcctgctgcctttactctgttcggcattcctgatcaggaagaggagacgaacaaatttgcgatccagatcccttacgcgctgggcataattgcaacgcgttccgtggatactccagttatcggcctgaaagaactgatggtgcagcatgaagaacgcattcgtaacgggatgaaggcgtactctctgctcgaacaactgcgttctggttctaccgaccaggcggttcgtgaccagttcaatagcatgaagaaggacctcggttacggtctgctgctgaaacgctatacgccaaacgtggctgatgcgactgaagcgcagattcaacaggcaaccaaagactccattccgcgtgtagcgccgctgtacttcgcgttccgtatcatggtggcgtgtggcttcctgctgctggcaatcatcgcgctctctttctggagtgtcatccgcaaccgcattggcgagaaaaaatggctcctgcgcgccgcgctgtacggtattccgctgccgtggattgctgtagaagcgggctggttcgtggctgaatatggccgccaaccgtgggctatcggtgaagtgctgccgacagctgtggcgaactcgtcactgaccgcaggcgatctcatcttctcaatggtgctgatttgcggcctgtataccctgttcctggtggcagaattgttcttaatgttcaagtttgcacgcctcggcccaagcagcctgaaaaccggtcgctatcactttgagcagtcttccacgactactcagccggcacgctaa

SEQ ID NO: 229 - protein, 450 aa, Escherichia coli
MLKSPLFWKMTTLFGAVLLLLIPIMLIRQVIVERADYRSDVEDAIRQSTSGPQKLVGPLIAIPVTELYTVQEEDKTVERKRSFIHFWLPESLMVDGNQNVEERKIGIYTGQVWHSDLTLKADFDVSRLSELDAPNITFGKPFIVISVGDARGIGVVKAPEVNGTALTIEPGIGLEQGGQGVHIPLPEGDWRKQNLKLNMALNLSGTGDLSVVPAGRNSEMTLTSNWPHPSFLGDFLPAKREVSESGFQAQWQSSWFANNLGERFASGNDTGWENFPAFSVAVTTPADQYQLTDRATKYAILLIALTFMAFFVFETLTAQRLHPMQYLLVGLSLVMFYLLLLALSEHTGFTVAWIIASLIGALMNGIYLQAVLKGWRNSMLFTLALLLLDGVMWGLLNSADSALLLGTSVLVVALAGMMFVTRNIDWYAFSLPKMKASKEVTTDDELRIWK

SEQ ID NO: 230 - DNA, 1353 bp, Escherichia coli
atgttgaaatcccccctgttytggaaaatgaccaccctgtttggtgcagtattgctgttgttgattccgataatgctgattcggcaggtgattgtcgaacgtgccgattaccgtagcgatgtggaagatgcgattcgccaaagtaccagcgggccgcaaaaactcgttgggcctcttatcgctattcctgtgaccgagctttatacggtgcaggaagargataaaaccgtggagcggaaacgaagttttatccatttttggttacctgagtcattgatggttgatggcaatcagaacgtggaagaacgcaagatagggatttataccggtcaggtctggcacagtgatttaacgctaaaagccgatttcgatgtttcgcgtcttagcgaactcgacgcgccaaatatcacctttggcaagccatttattgtgattagcgtcggggatgcgcgtggtattggtgtggtgaaagcgcctgaagttaacggaacggcgctgactattgaacccggcatcgggttagagcaaggcgggcagggcgtgcatatccctttacccgaaggggactggcggaagcagaacctgaagctgaatatggcactgaatttaagcggtaccggcgatctttctgtggtgcctgcggggcgtaatagcgaaatgaccttaaccagcaactggccgcatcccagttttttaggtgattttctaccagccaaacgggaagttagtgagtcaggttttcaggcgcaatggcaaagcagctggtttgctaataatctcggtgagcgttttgcttcaggcaatgataccggctgggaaaacttccccgcgtttagcgtcgcagtgacgacgcccgccgatcaataccaattaactgaccgggcgactaagtatgccattctgctgattgcgctgacttttatggcgttctttgtttttgaaacgctcaccgcgcaacgtttacacccaatgcaatatttgctggtggggctttcattggtgatgttttatttgctcttgctggcgctttctgaacataccggttttaccgtggcatggataatcgccagtctgattggggcgttaatgaacggtatttatttgcaggcggtattgaaaggttggcgcaacagcatgttgtttaccctcgcgctgttgttgctggatggtgtgatgtggggactcctcaactctgccgatagcgcgctgttgttgggaaccagtgtgctggtggtggcgctggccggcatgatgtttgtgactcgtaatatcgactggtatgcgttttcactgccgaaaatgaaagccagtaaagaagttacaacggacgatgaattacgtatctggaaataa

SEQ ID NO: 231 - protein, 337 aa, Escherichia coli
MRVLGIETSCDETGIAIYDDEKGLLANQLYSQVKLHADYGGVVPELASRDHVRKTVPLIQAALKESGLTAKDIDAVAYTAGPGLVGALLVGATVGRSLAFAWNVPAIPVHHMEGHLLAPMLEDNPPEFPFVALLVSGGHTQLISVTGIGQYELLGESIDDAAGEAFDKTAKLLGLDYPGGPLLSKMAAQGTAGRFVFPRPMTDRPGLDFSFSGLKTFAANTIRDNGTDDQTRADIARAFEDAVVDTLMIKCKRALDLTGFKRLVMAGGVSANRTLRAKLAEMMKKRRGEVFYARPEFCTDNGAMIAYAGMVRFKAGATADLGVSVRPRWPLAELPAA

SEQ ID NO: 232 - DNA, 1014 bp, Escherichia coli
atgcgtgtactgggtattgaaacttcctgcgatgaaaccggcatcgccatttacgacgatgaaaaaggtttgttagccaaccaattgtatagtcaggtgaaattgcacgctgactacgggggcgttgtgcctgaactggcctcccgcgatcatgtgcgtaaaaccgtaccgttgatccaggcggcgctaaaggagtctggtttaacggcaaaagacattgatgctgtggcctataccgcaggccctggattagtcggcgcactgctggttggcgcgaccgtggggcgttctctggcgtttgcctggaacgttccggcgatccctgtacaccatatggaagggcatctgttagcgccgatgctggaagataacccgccggaatttccgtttgttgcgctgctggtttccggcggtcatacgcagttaatcagcgtgactggcattggtcagtacgagctgctcggcgagtctatcgatgatgccgccggtgaagcgtttgataaaaccgcgaagctgctggggctggattatcctggcggaccgttactgtcgaaaatggcggcgcagggtactgccgggcgctttgttttcccgcgtccgatgaccgaccgtccggggctggatttcagcttctccggcctgaaaaccttcgcggcaaataccattcgtgacaacggcaccgacgaccagacgcgtgctgacatcgcccgcgcctttgaagatgcggtggtcgatacgttgatgattaagtgtaagcgtgcgctggatctgacgggctttaagcgactggtcatggcgggcggcgtgagtgctaaccgcacgttacgggcgaagctggctgaaatgatgaaaaaacgccgcggcgaagtgttctacgcgcgtccggaattttgtactgataacggcgcgatgatcgcctatgccggaatggtgcggtttaaagcaggcgcgacggcggatctcggcgttagcgtgcgtccgcgctggccgctggcggagttaccggctgcgtaa

SEQ ID NO: 233 - protein, 325 aa, Escherichia coli
MPDRTGFKKVDYAQWYGAYSTVERLANARHIAHQQDVRERANQRDGGDINQCRCEPIALQQILVHKKTPHKKRSYIGQKSEKGDQALNRRERRVCFQRLSYSFKGLIMKLNFKGFFKAASLFPLALMLSGCISYALVSHTAKGSSGKYQSQSDTITGLSQAKDSNGTKGYVFVGESLDYLITDGADDIVKMLNDPALNRHNIQVANDARFVLNAGKKKFTGTISLYYYWNNEEEKALATHYGFACGVQHCTRSLENLKGTIHEKNKNMDYSKVMAFYHPFKVRFYEYYSPRGIPDGVSAALLPVTVTLDIITAPLQFLVVYAVNQ

SEQ ID NO: 234 - DNA, 978 bp, Escherichia coli
atgcctgaccgcaccggctttaagaaagtggattatgcgcagtggtatggcgcatattccacagttgaaagattagccaacgcgcgtcacatcgcccaccagcaggatgtaagagagcgcgccaatcaacgcgacggcggagatataaaccagtgcaggtgcgaacccatagccttgcaacagatattagtccacaaaaaaacacctcataagaaaaggtcttatatcgggcagaaatctgaaaagggagatcaggcgctaaacaggagggaaagaagagtatgctttcaacggcttagctactcgtttaaaggattaatcatgaagttgaattttaagggattttttaaggctgccagtttattcccactggcgctgatgctttcaggctgtatctcgtatgctctggtttcccataccgcaaagggtagttcaggaaagtatcaatcgcagtcagacaccatcactgggctatcgcaggcaaaagatagtaatggaacaaaaggctatgtttttgtaggggaatcgctggattaccttatcactgatggtgccgatgacatcgttaagatgctcaatgatccagcacttaaccggcacaatattcaggttgccaatgacgcaagatttgttttaaatgcggggaaaaagaaatttaccggcacaatatcgctttactactactggaataacgaagaagaaaaggcactggcaacgcattatggttttgcctgtggtgttcaacactgtaccaggtcactggaaaacctaaaaggcacaatccatgagaaaaataaaaacatggattactcaaaggtgatggcgttctaccatccatttaaagtgcgattttatgaatactattcacccagaggcattccggatggtgtttccgcagcattactgccagtgactgttacgctggacatcattactgcgccgctgcaatttctggttgtatatgcagtaaaccaataa

SEQ ID NO: 235 - protein, 318 aa, Escherichia coli
MWKRLLVVSAVSAAMSSMALAAPLTVGFSQVGSESGWRAAETNVAKSEAEKRGITLKIADGQQKQENQIKAVRSFVAQGVDAIFIAPVVATGWEPVLKEAKDAEIPVFLLDRSIDVKDKSLYMTTVTADNILEGKLIGDWLVKEVNGKPCNVVELQGTVGASVAIDRKKGFAEAIKNAPNIKIIRSQSGDFTRSKGKEVMESFIKAENNGKNICMVYAHNDDMVIGAIQAIKEAGLKPGKDILTGSIDGVPDIYKAMMDGEANASVELTPNMAGPAFDALEKYKKDGTMPEKLTLTKSTLYLPDTAKEELEKKKNMGY

SEQ ID NO: 236 - DNA, 957 bp, Escherichia coli
atgtggaaacgcttacttgtagtctctgcagtctcggcagccatgtcgtctatggcgttggccgctccattaaccgtaggattttcgcaggtcggatcggaatccggctggcgcgccgcagaaaccaatgtggcgaaaagtgaggccgaaaaacgcggaattacgctgaaaattgccgatggtcagcaaaagcaggaaaaccagattaaagcggtacgttccttcgttgcacaaggggtggatgcgatctttatcgctccggtggtcgcgacaggttgggaaccggtattaaaagaggcgaaagatgccgaaatcccggtcttcttgctcgaccgttccatcgatgtgaaagacaaatctctctatatgaccaccgttactgccgacaacatcctcgaaggtaagttgatcggtgactggctggtaaaagaagtgaatggcaaaccatgcaacgtggtggagctgcagggcaccgttggggccagcgtcgccattgaccgtaagaaaggctttgccgaagccattaagaatgcgccaaatatcaaaatcatccgctcgcagtcaggtgacttcacccgcagtaaaggcaaagaagtcatggagagctttatcaaagcggaaaacaacggcaaaaacatctgcatggtttacgcccataacgacgacatggtgattggtgcaattcaggcaattaaagaagcgggcctgaaaccgggcaaagatatcctcacgggttccattgacggtgtaccggacatctacaaagcgatgatggatggcgaagcgaacgccagtgttgaactgacgccgaacatggcgggacccgctttcgatgcgctggagaaatacaaaaaagacggcaccatgcctgaaaagctgacgttaaccaaatccaccctttacctgcctgataccgcaaaagaagagttagagaagaagaaaaatatggggtattga

SEQ ID NO: 237 - protein, 388 aa, Escherichia coli
MNLHEYQAKQLFARYGLPAPVGYACTTPREAEEAASKIGAGPWVVKCQVHAGGRGKAGGVKVVNSKEDIRAFAENWLGKRLVTYQTDANGQPVNQILVEAATDIAKELYLGAVVDRSSRRVVFMASTEGGVEIEKVAEETPHLIHKVALDPLTGPMPYQGRELAFKLGLEGKLVQQFTKIFMGLATIFLERDLALIEINPLVITKQGDLICLDGKLGADGNALFRQPDLREMRDQSQEDPREAQAAQWELNYVALDGNIGCMVNGAGLAMGTMDIVKLHGGEPANFLDVGGGATKERVTEAFKIILSDDKVKAVLVNIFGGIVRCDLIADGIIGAVAEVGVNVPVVVRLEGNNAELGAKKLADSGLNIIAAKGLTDAAQQVVAAVEGK

SEQ ID NO: 238 - DNA, 1167 bp, Escherichia coli
atgaacttacatgaatatcaggcaaaacaactgtttgcccgctatggcttaccagcaccggtgggttatgcctgtactactccgcgcgaagcagaagaagccgcttcaaaaatcggtgccggtccgtgggtagtgaaatgtcaggttcacgctggtggccgcggtaaagcgggcggtgtgaaagttgtaaacagcaaagaagacatccgtgcttttgcagaaaactggctgggcaagcgtctggtaacgtatcaaacagatgccaatggccaaccggttaaccagattctggttgaagcagcgaccgatatcgctaaagagctgtatctcggtgccgttgtagaccgtagttcacgtcgcgtggtctttatggcctccaccgaaggcggcgtggaaatcgaaaaagtggcggaagaaactccgcacctgatccacaaagttgcgcttgatccgctgactggcccgatgccgtatcagggacgcgagctggcgttcaaactgggtctggaaggtaaactggttcagcagttcaccaaaatcttcatgggcctggcgaccattttcctggagcgcgacctggcgctgatcgaaatcaacccgctggtcatcaccaaacagggcgatctgatttgcctcgacggcaaactgggcgctgatggcaacgccctgttccgccagcctgatctgcgcgaaatgcgtgaccagtcgcaggaagatccgcgtgaagcacaggctgcacagtgggaactgaactacgttgcgctggacggtaacatcggttgtatggttaacggcgcaggcctggcgatgggtacgatggacatcgttaaactgcacggcggcgaaccggctaacttcctggacgttggcggcggcgcaaccaaagaacgtgtaaccgaagcgttcaaaatcatcctctctgacgacaaagtgaaagccgttctggttaacatcttcggcggtatcgttcgttgcgacctgatcgctgacggtatcatcggtgcggtagcggaagtgggtgttaacgtaccggtcgtggtacgtctggaaggtaacaacgccgaactcggcgcgaagaaactggctgacagcggcctgaatattattgcagcaaaaggtctgacggatgcagctcagcaggttgttgccgcagtggaggggaaataa

SEQ ID NO: 239 - protein, 255 aa, Escherichia coli
MRHPLVMGNWKLNGSRHMVHELVSNLRKELAGVAGCAVAIAPPEMYIDMAKREAEGSHIMLGAQNVDLNLSGAFTGETSAAMLKDIGAQYIIIGHSERRTYHKESDELIAKKFAVLKEQGLTPVLCIGETEAENEAGKTEEVCARQIDAVLKTQGAAAFEGAVIAYEPVWAIGTGKSATPAQAQAVHKFIRDHIAKVDANIAEQVIIQYGGSVNASNAAELFAQPDIDGALVGGASLKADAFAVIVKAAEAAKQA

SEQ ID NO: 240 - DNA, 768 bp, Escherichia coli
atgcgacatcctttagtgatgggtaactggaaactgaacggcagccgccacatggttcacgagctggtttctaacctgcgtaaagagctggcaggtgttgctggctgtgcggttgcaatcgcaccaccggaaatgtacatcgatatggcgaagcgtgaagctgaaggcagccacatcatgctgggtgcgcaaaacgtggacctgaacctgtccggcgcattcaccggtgaaacctctgctgctatgctgaaagacatcggcgcacagtacatcatcatcggtcactctgaacgtcgtacttaccacaaagaatctgacgaactgatcgcgaaaaaattcgcggtgctgaaagarcagggcctgactccggttctgtgcatcggtgaaaccgaagctgaaaacgaagcgggcaaaactgaagaagtttgcgcacgtcaratcgacgcggtactgaaaactcagggtgctgcggcattcgaaggtgcggttatcgcttacgaacctgtatgggcaatcggtactggcaaatctgcaactccggctcaggcacaggctgttcacaaattcattcgtgaccacatcgctaaagttgacgctaacatcgctgaacaagtgatcattcagtacggcggctctgtaaacgcgtctaacgctgcagaactgtttgctcagccagacatcgacggcgcgctggttggcggtgcgtctctgaaagctgacgctttcgcagtaatcgttaaagctgcagaagcggctaaacaggcttaa

SEQ ID NO: 241 - protein, 113 aa, Escherichia coli
MGDHMFNRPNRNDVDDGVQDIQNDVNQLADSLESVLKSWGSDAKGEAEAARSKAQALLKETRARMHGRTRVQQAARDAVGCADSFVRERPWCSVGTAAAVGIFIGALLSMRKS

SEQ ID NO: 242 - DNA, 342 bp, Escherichia coli
atgggggatcatatgtttaaccgaccgaaccgcaacgacgttgatgatggcgtgcaggatatccagaatgatgtcaatcaattagctgacagcctcgaatctgtattgaagtcctggggcagcgacgccaaaggggaagctgaagccgcacgcagtaaagctcaggcattgctgaaagaaaccagggcgcgaatgcatggtcgtactcgcgtccagcaagccgcgcgcgatgccgtaggctgcgcggattcttttgttcgtgaaagaccctggtgtagtgtgggaactgctgctgcggtaggtatttttatcggtgcgttgttgagcatgcgtaaatcgtag

SEQ ID NO: 243 - protein, 646 aa, Escherichia coli
MMSYVDWPPLILRHTYYMAEFETTFADLGLKAPILEALNDLGYEKPSPIQAECIPHLLNGRDVLGMAQTGSGKTAAFSLPLLQNLDPELKAPQILVLAPTRELAVQVAEAMTDFSKHMRGVNVVALYGGQRYDVQLRALRQGPQIVVGTPGRLLDHLKRGTLDLSKLSGLVLDEADEMLRMGFIEDVETIMAQIPEGHQTALFSATMPEAIRRITRRFMKEPQEVRIQSSVTTRPDISQSYWTVWGMRKNEALVRFLEAEDFDAAIIFVRTKNATLEVAEALERNGYNSAALNGDMNQALREQTLERLKDGRLDILIATDVAARGLDVERISLVVNYDIPMDSESYVHRIGRTGRAGRAGRALLFVENRERRLLRNIERTMKLTIPEVELPNAELLGKRRLEKFAAKVQQQLESSDLDQYRALLSKIQPTAEGEELDLETLAAALLKMAQGERTLIVPPDAPMRPKREFRDRDDRGPRDRNDRGPRGDREDRPRRERRDVGDMQLYRIEVGRDDGVEVRHIVGAIANEGDISSRYIGNIKLFASHSTIELPKGMPGEVLQHFTRTRILNKPMNMQLLGDAQPHTGGERRGGGRGFSGERREGGRNFSGERREGGRGDGRRFSGERREGRAPRRDDSTGRRRFGGDA

SEQ ID NO: 244 - DNA, 1941 bp, Escherichia coli
atgatgagttatgtagactggccgccattaattttgaggcacacgtactacatggctgaattcgaaaccacttttgcagatctgggcctgaaggctcctatccttgaagcccttaacgatctgggttacgaaaaaccatctccaattcaggcggagtgtattccacatctgctgaatggccgcgacgtactgggtatggcccagacggggagcggaaaaactgcagcattctctttacctctgctgcaaaatcttgatcctgagctgaaagcaccacagattctggtgctagcaccgacccgcgaactggcggtacaggttgctgaagcaatgacggatttctctaaacacatgcgcggcgtaaatgtggttgccctgtacggcggccagcgttatgacgtgcaattacgcgccctgcgtcaggggccgcagatcgttgtcggtactccgggccgtctgctggaccacctgaaacgtggcactctggacctctctaaactgagcggtctggttctggatgaagctgacgaaatgctgcgcatgggcttcatcgaagacgttgaaactattatggcgcagatcccggaaggtcatcagaccgctctgttctctgcaaccatgccggaagcgattcgtcgcattacccgccgctttatgaaagagccgcaggaagtgcgcattcagtccagcgtgactacccgtcctgacatcagccagagctattggactgtctggggtatgcgtaaaaacgaagcactggtacgtttcctggaagcggaagattttgatgcggcgattatcttcgttcgtaccaaaaatgcgactctggaagtggctgaagctcttgagcgtaacggctacaacagcgccgcgctgaacggtgacatgaaccaggcgctgcgtgagcagacactggaacgcctgaaagatggtcgtctggacatcctgattgcgaccgacgttgcagcccgtggcctggacgttgagcgtatcagcctggtggttaactacgatatcccgatggattctgagtcttacgttcaccgtatcggtcgtaccggtcgtgcgggtcgtgctggccgcgcgctgctgttcgttgagaaccgcgagcgtcgtctgctgcgcaacattgaacgtactatgaagctgactattccggaagtagaactgccgaacgcagaactgctgggcaaacgccgtctggaaaaattcgccgctaaagtacagcagcagctggaaagcagcgatctggatcaataccgcgcactgctgagcaaaattcagccgactgcagaaggtgaagagctggatctcgaaactctggccgccgcactgctgaaaatggcacagggtgaacgtactctgattgttccgccagatgcgccgatgcgtccgaaacgtgaattccgtgaccgtgatgaccgtggtccgcgcgatcgtaacgaccgtggtccgcgtggcgaccgtgaagatcgtccgcgtcgtgaacgtcgtgatgttggtgacatgcagttgtaccgtattgaagtgggccgcgatgatggtgttgaagttcgtcatatcgttggtgcgattgctaacgaaggcgacatcagcagccgttacatcggtaacattaagctgtttgcttctcactccaccatcgaactgccgaaaggtatgccgggtgaagtgctgcaacactttacacgtactcgcattctgaacaagccgatgaatatgcaattactgggcgatgcacagccgcatactggcggagagcgtcgtggcggtggtcgtggtttcagtggcgagcgtcgtgaaggtggtcgtaacttcagcggtgaacgccgtgaaggtggtcgtggtgatggtcgtcgttttagcggcgaacgtcgtgaaggccgcgctccgcgtcgtgatgactctaccggtcgtcgtcgtttcggwggtgatgcgtaa

SEQ ID NO: 245 - protein, 887 aa, Escherichia coli
MSERFPNDVDPIETRDWLQAIESVIREEGVERAQYLIDQLLAEARKGGVNVAAGTGISNYINTIPVEEQPEYPGNLELERRIRSAIRWNAIMTVLRASKKDLELGGHMASFQSSATIYDVCFNHFFRARNEQDGGDLVYFQGHISPGVYARAFLEGRLTQEQLDNFRQEVHGNGLSSYPHPKLMPEFWQFPTVSMGLGPIGAIYQAKFLKYLEHRGLKDTSKQTVYAFLGDGEMDEPESKGAITIATREKLDNLVFVINCNLQRLDGPVTGNGKIINELEGIFEGAGWNVIKVMWGSRWDELLRKDTSGKLIQLMNETVDGDYQTFKSKDGAYVREHFFGKYPETAALVADWTDEQIWALNRGGHDPKKIYAAFKKAQETKGKATVILAHTIKGYGMGDAAEGKNIAHQVKKMNMDGVRHIRDRFNVPVSDADIEKLPYITFPEGSEEHTYLHAQRQKLHGYLPSRQPNFTEKLELPSLQDFGALLEEQSKEISTTIAFVRALNVMLKNKSIKDRLVPIIADEARTFGMEGLFRQIGIYSPNGQQYTPQDREQVAYYKEDEKGQILQEGINELGAGCSWLAAATSYSTNNLPMIPFYIYYSMFGFQRIGDLCWAAGDQQARGFLIGGTSGRTTLNGEGLQHEDGHSHIQSLTIPNCISYDPAYAYEVAVIMHDGLERMYGEKQENVYYYITTLNENYHMPAMPEGAEEGIRKGIYKLETIEGSKGKVQLLGSGSILRHVREAAEILAKDYGVGSDVYSVTSFTELARDGQDCERWNMLHPLETPRVPYIAQVMNDAPAVASTDYMKLFAEQVRTYVPADDYRVLGTDGFGRSDSRENLRHHFEVDASYVVVAALGELAKRGEIDKKVVADAIAKFNIDADKVNPRLA

SEQ ID NO: 246 - DNA, 2664 bp, Escherichia coli
atgtcagaacgtttcccaaatgacgtggatccgatcgaaactcgcgactggctccaggcgatcgaatcggtcatccgtgaagaaggtgttgagcgtgctcagtatctgatcgaccaactgcttgctgaagcccgcaaaggcggtgtcaacgtagccgcaggcaccggtatcagcaactacatcaacaccatccccgttgaagaacaaccggagtatccgggtaatctggaactggaacgccgtattcgttcagctatccgctggaacgccatcatgacggttctgcgtgcgtcgaaaaaagacctcgaactgggcggccacatggcgtccttccagtcttccgcaaccatttatgatgtgtgctttaaccacttcttccgtgcacgcaacgagcaggatggcggcgacctggtttacttccagggccacatctccccgggcgtgtacgctcgtgctttcctggaaggtcgtctgactcaagagcagctggataacttccgtcaggaagttcacggcaatggcctctcttcctatccgcacccgaaattgatgccggaattctggcagttcccgaccgtatctatgggtctgggtccgattggtgctatttaccaggctaaattcctgaaatatctggaacaccgtggcctgaaagatacctctaaacagaccgtttacgcgttcctcggcgacggtgaaatggacgaaccggaatccaaaggtgcgatcaccatcgctacccgtgaaaaactggataacctggtcttcgttatcaactgtaacctgcagcgtcttgacggcccggtcaccggtaacggcaagatcatcaacgaactggaaggtatcttcgaaggtgctggctggaacgtgatcaaagtgatgtggggtagccgttgggatgaactgctgcgtaaagataccagcggtaaactgatccagctgatgaacgaaaccgttgacggcgactaccagaccttcaaatcgaaagatggtgcgtacgttcgtgaacacttcttcggtaaatatcctgaaaccgcagcactggttgcagactggactgacgagcagatctgggcactgaaccgtggtggtcacgatccgaagaaaatctacgctgcattcaagaaagcgcaggaaaccaaaggcaaagcgacggtaatccttgctcataccattaaaggttacggcatgggcgacgcggctgaaggtaaaaacatcgcgcaccaggttaagaaaatgaacatggacggtgtgcgtcacatccgcgaccgtttcaatgtgccggtgtctgatgcagatatcgaaaaactgccgtacatcaccttcccggaaggttctgaagagcatacctatctgcacgcacagcgtcagaaactgcacggttatctgccaagccgtcagccgaacttcaccgagaagcttgagctgccaagcctgcaagacttcggcgcgctgctggaagagcagagcaaagagatctctaccactatcgctttcgttcgtgccctgaacgtgatgctgaagaacaagtcgatcaaagatcgtctggtaccgatcatcgccgacgaagcgcgtactttcggtatggaaggtctgttccgtcagattggtatttacagcccgaacggtcagcagtacaccccgcaggaccgcgagcaggttgcttactataaagaagacgagaaaggtcagattctgcaggaagggatcaacgagctgggcgcaggttgttcctggctggcagcggcgacctcttacagcaccaacaatctgccgatgattccgttctacatctattactcgatgttcggcttccagcgtatcggcgatctgtgctgggcggctggcgaccagcaagcgcgtggcttcctgatcggcggtacttccggtcgtaccaccctgaacggtgaaggtctgcagcacgaagatggtcacagccacattcagtcgctgactattccgaactgtatctcttacgacccggcttacgcttacgaagttgctgtcattatgcatgacggtctggagcgtatgtacggtgaaaaacaagagaacgtttactactacatcaccacgctgaacgaaaactaccacatgccggcaatgccggaaggtgctgaggaaggtatccgtaaaggtatctacaaactcgaaaccattgaaggtagcaaaggtaaagttcagctgctgggctccggttctatcctgcgtcacgtccgtgaagcggcagagatcctggcgaaagattacggcgtaggttctgacgtttatagcgtgacctccttcaccgaactggcgcgtgatggtcaggattgtgaacgctggaacatgctgcatccgctggaaactccgcgcgttccgtatatcgctcaggtgatgaacgacgctccggctgtggcatctaccgactatatgaaactgttcgctgagcaggtccgtacttacgtaccggctgacgactaccgcgtactgggtactgatggcttcggtcgttccgacagccgtgagaacctgcgtcaccacttcgaagttgatgcttcttatgtcgtggttgcggcgctgggcgaactggctaaacgtggcgaaatcgataagaaagtggttgctgacgcaatcgccaaattcaacatcgatgcagataaagttaacccgcgtctggcgtaa

SEQ ID NO: 247 - protein, 468 aa, Escherichia coli
MSKQQIGVVGMAVMGRNLALNIESRGYTVSIFNRSREKTEEVIAENPGKKLVPYYTVKEFVESLETPRRILLMVKAGAGTDAAIDSLKPYLDKGDIIIDGGNTFFQDTIRRNRELSAEGFNFIGTGVSGGEEGALKGPSIMPGGQKEAYELVAPILTKIAAVAEDGEPCVTYIGADGAGHYVKMVHNGIEYGDMQLIAEAYSLLKGGLNLTNEELAQIFTEWNNGELSSYLIDITKDIFTKKDEDGNYLVDVILDEAANKGTGKWTSQSALDLGEPLSLITESVFARYISSLKDQRVAASKVLSGPQAQPAGDKAEFIEKVRRALYLGKIVSYAQGFSQLRAASEEYNWDLNYGEIAKIFRAGCIIRAQFLQKITDAYAENPQIANLLLAPYFKQIADDYQQALRDVVAYAVQNGIPVPTFAAAVAYYDSYRAAVLPANLIQAQRDYFGAHTYKRIDKEGVFHTEWLD

SEQ ID NO: 248 - DNA, 1407 bp, Escherichia coli
atgtcaaagcaacagatcggcgtagtcggtatggcagtgatggggcgcaaccttgcgctcaacatcgaaagccgtggttataccgtctctattttcaaccgttcccgtgaaaagacggaagaagtgattgccgaaaatccaggcaagaaactggttccttactatacggtgaaagaatttgttgaatctctggaaacgcctcgtcgcatcttgttaatggtgaaagcaggtgcaggcacggatgctgctattgattcccttaagccatacctcgataaaggtgacatcatcattgatggtggtaataccttcttccaggacaccattcgtcgtaaccgtgagctttctgcagaaggctttaacttcatcggtaccggtgtttccggtggtgaggagggcgcactaaaaggtccttccattatgcctggtgggcagaaagaagcctatgaactagttgcgccgatcctgaccaaaatcgccgcagtggctgaagacggtgagccatgcgttacctatattggtgccgatggcgcaggtcactatgtgaagatggttcacaacggtattgaatacggcgatatgcagctgattgctgaagcctattctctgcttaaaggtggtctgaacctcaccaacgaagaactggcgcagatctttaccgagtggaataacggtgaactgagcagctacctgatcgacattaccaaagacatcttcactaaaaaagatgaagacggtaactacctggttgatgtgatcctggatgaagcggcaaacaaaggtacgggcaaatggaccagccagagcgcactggatctcggcgaaccgctgtcgctgattaccgagtctgtgtttgcacgatacatctcttctctgaaagatcagcgcgttgctgcgtctaaagttctctctggcccacaagcgcagccagctggcgacaaggctgagttcatcgaaaaagttcgccgtgcactgtatctgggcaaaatcgtttcttacgctcaggggttctctcaactgcgtgcggcgtctgaagagtacaactgggatctgaactacggcgaaatcgcgaagattttccgtgctggctgcatcatccgtgcgcagttcctgcagaaaatcaccgatgcttatgccgaaaatccgcagatcgctaacctgctgctggctccttacttcaagcaaattgccgatgactaccagcaggcgctgcgcgatgtcgtcgcttatgcggtacagaacggtatcccggttccgaccttcgccgctgcggttgcctattatgacagctaccgcgccgctgttctgcctgcgaacctgatccaggcacagcgtgactatttcggtgcgcatacttataagcgcattgataaagaaggtgtgttccataccgaatggctggattaa

SEQ ID NO: 249 - protein, 797 aa, Escherichia coli
MSQPIFNDKQFQEALSRQWQRYGLNSAAEMTPRQWWLAVSEALAEMLRAQPFAKPVANQRHVNYISMEFLIGRLTGNNLLNLGWYQDVQDSLKAYDINLTDLLEEEIDPALGNGGLGRLAACFLDSMATVGQSATGYGLNYQYGLFRQSFVDGKQVEAPDDWHRSNYPWFRHNEALDVQVGIGGKVTKDGRWEPEFTITGQAWDLPVVGYRNGVAQPLRLWQATHAHPFDLTKFNDGDFLRAEQQGINAEKLTKVLYPNDNHTAGKKLRLMQQYFQCACSVADILRRHHLAGRKLHELADYEVIQLNDTHPTIAIPELLRVLIDEHQMSWDDAWAITSKTFAYTNHTLMPEALERWDVKLVKGLLPRHMQIINEINTRFKTLVEKTWPGDEKVWAKLAVVHDKQVHMANLCVVGGFAVNGVAALHSDLVVKDLFPEYHQLWPNKFHNVTNGITPRRWIKQCNPALAALLDKSLKKEWANDLDQLINLEKFADDAKFRQQYREIKQANKVRLAEFVKVRTGIEINPQAIFDIQIKRLHEYKRQHLNLLHILALYKEIRENPQADRVPRVFLFGAKAAPGYYLAKNIIFAINKVADVINNDPLVGDKLKVVFLPDYCVSAAEKLIPAADISEQISTAGKEASGTGNMKLALNGALTVGTLDGANVEIAEKVGEENIFIFGHTVEQVKAILAKGYDPVKWRKKDKVLDAVLKELESGKYSDGDKHAFDQMLHSIGKQGGDPYLVMADFAAYVEAQKQVDVLYRDQEAWTRAAILNTARCGMFSSDRSIRDYQARIWQAKR

SEQ ID NO: 250 - DNA, 2394 bp, Escherichia coli
atgtcacaacctatttttaacgataagcaatttcaggaagcgctttcacgtcagtggcagcgttatggcttaaattctgcggctgaaatgactcctcgccagtggtggctggcagtgagtgaagcactggccgaaatgctgcgtgctcagccattcgccaagccggtggcgaatcagcgacatgttaactacatctcaatggagtttttgattggtcgtctgacgggcaacaacctgttgaatctcggctggtatcaggatgtacaggattcgttgaaggcttatgacatcaatctgactgacctgctggaagaagagatcgaccctgcgctgggtaacggtggtctgggacgtctggcggcgtgcttcctcgattcaatggcaactgtcggtcagtctgcgacgggttacggtctgaactatcaatatggtttgttccgccagtcttttgtggatggcaaacaggttgaagcgccggatgactggcatcgcagtaactacccgtggttccgccacaacgaagcactggatgtgcaggtagggattggcggtaaagtgacgaaagacggacgctgggagccggagtttaccattaccggtcaagcgtgggatctccccgttgtcggctatcgtaatggcgtggcgcagccgctgcgtctgtggcaggcgacgcacgcgcatccgtttgatctgactaaatttaacgacggtgatttcctgcgtgccgaacagcagggcatcaatgcggaaaaactgaccaaagttctctatccaaacgacaaccatactgccggtaaaaagctgcgcttgatgcagcagtacttccagtgtgcctgttcggtagcggatattttgcgtcgccatcatctggcggggcgtaaactgcacgaactggcggattacgaagttattcagctgaacgatacccacccaactatcgcgattccagaactgttgcgcgtgctgatcgatgagcaccagatgagctgggatgacgcctgggccattaccagcaaaactttcgcttacaccaaccataccctgatgccagaagcgctggaacgctgggatgtgaaactggtgaaaggcttactgccgcgccacatgcagattattaacgaaattaatactcgctttaaaacgctggtggagaaaacctggccgggcgatgaaaaagtgtgggctaaactggcggtggtgcacgacaaacaagtgcatatggcgaacctgtgtgtggttggcggtttcgcggtgaacggtgttgcggcgctgcactcggatctggtggtgaaagatctgttcccggaatatcaccagctatggccgaacaaattccataacgtcaccaacggtattaccccacgtcgctggatcaaacagtgcaacccggcactggcggctctgttggataaatcactgaaaaaagagtgggctaacgatctcgatcagctgatcaatctggaaaaattcgctgatgatgcgaaattccgtcagcaatatcgcgagatcaagcaggcgaataaagtccgtctggcggagtttgtgaaagttcgtaccggtattgagatcaatccacaggcgattttcgatattcagatcaaacgtctgcatgagtacaaacgccagcacctgaatctgctgcatattctggcgttgtacaaagaaattcgtgaaaacccacaggctgatcgcgtaccgcgcgtcttcctcttcggcgcgaaagcggcaccgggctactacctggcgaaaaatattatctttgcgatcaacaaagtggctgacgtgatcaacaacgatccgctggttggcgataagttgaaggtggtgttcctgccggattattgcgtttcggcggcggaaaaactgatcccggcggcggatatctccgaacaaatttcgactgcaggtaaagaagcttccggtaccggcaatatgaaactggcgctcaatggtgcgcttactgtcggtacgctggatggggcgaacgttgaaatcgccgagaaagtcggtgaagaaaatatctttatttttggtcataccgtggaacaagtgaaggcaattctggccaaaggctacgacccggtgaaatggcggaagaaagataaggtgctggacgcagtattgaaagagctggaaagcggtaaatacagcgacggcgataagcatgccttcgaccagatgctgcacagtatcggcaaacagggcggcgatccgtatctggtgatggcggatttcgcagcctatgtagaggcacaaaagcaggtggatgtgctgtaccgcgaccaggaggcctggactcgcgcggcgatcctcaataccgcccgctgcggtatgtttagctcggatcgctctattcgcgattatcaggctcgtatctggcaggcaaaacgctaa

SEQ ID NO: 251 - protein, 97 aa, Escherichia coli [sequence omitted]

SEQ ID NO: 252 - DNA, 294 bp, Escherichia coli
atgaatattcgtccattgcatgatcgcgtgatcgtcaagcgtaaagaagttgaaactaaatctgctggcggcatcgttctgaccggctctgcagcggctaaatccacccgcggcgaagtgctggctgtcggcaatggccgtatccttgaaaatggcgaagtgaagccgctggatgtgaaagttggcgacatcgttattttcaacgatggctacggtgtgaaatccgagaagatcgacaatgaagaagtgttgatcatgtccgaaagcgacattctggcaattgttgaagcgtaa

SEQ ID NO: 253 - protein, 374 aa, Escherichia coli
MIARKRRARTIHSRYPIGIYGSIVMTDIAQLLGKDADNLLQHRCMTIPSDQLYLPGHDYVDRVMIDNNRPPAVLRNMQTLYNTGRLAGTGYLSILPVDQGVEHSAGASFAANPLYFDPKNIVELAIEAGCNCVASTYGVLASVSRRYAHRIPFLVKLNHNETLSYPNTYDQTLYASVEQAFNMGAVAVGATIYFGSEESRRQIEEISAAFERAHELGMVTVLWAYLRNSAFKKDGVDYHVSADLTGQANHLAATIGADIVKQKMAENNGGYKAINYGYTDDRVYSKLTSENPIDLVRYQLANCYMGRAGLINSGGAAGGETDLSDAVRTAVINKRAGGMGLILGRKAFKKSMADGVKLINAVQDVYLDSKITIA

SEQ ID NO: 254 - DNA, 1125 bp, Escherichia coli
atgattgcccgcaaaaggcgggccaggacaatccatagccgatatccaatcggaatttacgggagcatagtaatgacagatattgcgcagttgcttggcaaagacgccgacaaccttttacagcaccgttgtatgactattccttctgaccagctttatctccccggacatgactacgtagaccgcgtgatgattgacaataatcgcccgccagcggtgttacgtaatatgcagacgttgtacaacaccgggcgtctggctggcacaggatatctttctattctgccggttgaccagggcgttgagcactctgccggagcttcatttgctgctaacccgctctactttgacccgaaaaacattgttgaactggcgatcgaagcgggctgtaactgtgtggcatcaacttacggcgtgttggcgtcggtatcgcggcgctatgcgcatcgcattccatttctcgtaaaacttaatcacaacgagacgctaagttacccgaatacctacgatcaaacgctgtatgccagcgtggagcaggccttcaacatgggcgcggtggcggttggtgcgactatctattttggctcggaagagtcacgtcgccagattgaagaaatttctgcggcttttgaacgtgcgcacgagctgggcatggtgacagtgctgtgggcctatttgcgtaactccgcctttaagaaagatggcgttgattaccatgtctccgccgacctgactggtcaggcgaaccatctggcggcaaccataggtgcagatatcgtcaaacaaaaaatggcggaaaataacggcggctataaagcaattaattacggttataccgacgatcgcgtgtacagcaagttaaccagcgaaaacccgattgatctggtgcgttatcagttagctaactgctatatgggccgggccgggttgataaactccggtggtgctgcaggcggtgaaactgacctcagtgatgcagtgcgtactgcggttatcaacaaacgcgctggcggaatggggctgattcttggacgtaaggcgttcaagaaatcgatggctgacggcgtgaaactgattaacgccgtgcaggacgtttatctcgatagcaaaattactatcgcctga

SEQ ID NO: 255 - protein, 734 aa, Escherichia coli
MRRRSGINTSAVRYCLRKRKDITLLNPIVRKFQYGQHTVTLETGMMARQATAAVMVSMDDTAVFVTVVGQKKAKPGQDFFPLTVNYQERTYAAGRIPGSFFRREGRPSEGETLIARLIDRPIRPLFPEGFVNEVQVIATVVSVNPQVNPDIVAMIGASAALSLSGIPFNGPIGAARVGYINDQYVLNPTQDELKESKLDLVVAGTEAAVLMVESEAELLSEDQMLGAVVFGHEQQQVVIQNINELVKEAGKPRWDWQPEPVNEALNARVAALAEARLSDAYRITDKQERYAQVDVIKSETIATLLAEDETLDENELGEILHAIEKNVVRSRVLAGEPRIDGREKDMIRGLDVRTGVLPRTHGSALFTRGETQALVTATLGTARDAQVLDELMGERTDTFLFHYNFPPYSVGETGMVGSPKRREIGHGRLAKRGVLAVMPDMDKFPYTVRVVSEITESNGSSSMASVCGASLALMDAGVPIKAAVAGIAMGLVKEGDNYVVLSDILGDEDHLGDMDFKVAGSRDGISALQMDIKIEGITKEIMQVALNQAKGARLHILGVMEQAINAPRGDISEFAPRIHTIKINPDKIKDVIGKGGSVIRALTEETGTTIEIEDDGTVKIAATDGEKAKHAIRRIEEITAEIEVGRVYTGKVTRIVDFGAFVAIGGGKEGLVHISQIADKRVEKVTDYLQMGQEVPVKVLEVDRQGRIRLSIKEATEQSQPAAAPEAPAAEQGE

SEQ ID NO: 256 - DNA, 2205 bp, Escherichia coli
atgcgcagaagatcgggtattaacaccagtgccgtaaggtactgtctaagaaagagaaaggatattacattgcttaatccgatcgttcgtaaattccagtacggccaacacaccgtgactctggaaaccggcatgatggctcgtcaggctactgccgctgttatggttagcatggatgacaccgcggtatttgttaccgttgttggccagaaaaaagccaaaccaggtcaggacttyttcccactgaccgttaactatcaggagcgtacctacgctgctggtcgtatcccgggtagcttcttccgtcgtgaaggtcgtccaagcgaaggcgaaaccctgatcgcgcgtctgattgaccgcccgattcgcccgctgttcccggaaggcttcgtcaacgaagttcaggttatcgccaccgtggtttctgttaacccgcaggttaacccggatatcgtcgcgatgattggtgcttccgcagcactgtctctgtctggtattccgttcaatggcccgattggtgctgcccgcgtaggttacatcaatgaccagtacgtactgaacccgactcaggacgagctgaaagagagcaaactggatctggttgttgcgggtactgaagccgctgtactgatggttgaatctgaagctgaactgctgagcgaagaccagatgctgggcgcagtagtgttcggtcatgaacaacagcaggttgttattcagaacatcaatgaactggtgaaagaagccggtaaaccgcgttgggactggcagccggagccggtaaacgaagcgctgaacgcgcgcgttgctgcactggctgaagctcgtctgagcgatgcttaccgcatcaccgacaaacaagagcgttatgcgcaggttgatgtcatcaaatctgaaaccatcgcgacgctgcttgctgaagacgaaaccctggacgaaaacgaactgggtgaaattctgcacgcgatcgagaaaaacgttgttcgtagccgcgtactggcaggcgaaccgcgtatcgatggtcgtgaaaaagatatgatccgtggtctggatgtgcgtactggcgtgctgccgcgtactcacggttctgcgctgttcacccgtggtgaaacgcaggcgctggttaccgcaacgctgggtactgctcgtgacgcgcaggttcttgatgaactgatgggcgaacgtaccgataccttcctgttccactacaacttccctccgtactccgtaggcgaaaccggcatggtcggttctccgaagcgtcgtgaaattggtcacggtcgtctggcgaagcgcggcgtgctggcagtaatgccggatatggacaaattcccgtacaccgtacgtgttgtgtctgaaatcactgaatccaacggttcttcttctatggcttccgtgtgcggtgcgtctctggcgctgatggacgcaggtgtgccaatcaaagctgccgttgcgggtatcgcaatgggtctggtgaaagaaggcgacaactacgttgtactgtctgacattttgggcgacgaagatcacctgggcgatatggacttcaaagttgcgggttcccgcgacggtatctctgcactgcagatggatatcaaaattgaaggtatcaccaaagagatcatgcaggttgcactgaaccaggctaaaggtgcgcgtctgcacatcctgggtgtaatggaacaggcgatcaacgcgccacgtggcgatatctctgagttcgctccgcgtatccataccatcaagatcaacccggacaagatcaaagacgttatcggtaaaggcggctctgtgatccgtgccctgaccgaagaaactggcaccaccatcgaaatcgaagatgacggtactgtgaagatcgcagcgaccgatggcgagaaagcgaaacacgctattcgtcgtatcgaagagatcactgcagaaattgaagtgggccgcgtctacactggtaaagtgacccgtatcgttgacttcggcgcatttgttgccatcggcggcggtaaagaaggtctggtccacatctctcaaatcgctgacaaacgcgttgagaaagtgaccgattacctgcagatgggtcaggaagtaccggtgaaagttctggaagttgatcgccagggccgtatccgtctgagcattaaagaagcgactgagcagtctcaacctgctgcagcaccggaagctccggctgctgaacagggcgagtaa

SEQ ID NO: 257 - protein, 476 aa, Escherichia coli
MKDYVMENFKHLPEPFRIRVIEPVKRTTRAYREEAIIKSGMNPFLLDSEDVFIDLLTDSGTGAVTQSMQAAMMRGDEAYSGSRSYYALAESVKNIFGYQYTIPTHQGRGAEQIYIPVLIKKREQEKGLDRSKMVAFSNYFFDTTQGHSQINGCTVRNVYIKEAFDTGVRYDFKGNFDLEGLERGIEEVGPNNVPYIVATITSNSAGGQPVSLANLKAMYSIAKKYDIPVVMDSARFAENAYFIKQREAEYKDWTIEQITRETYKYADMLAMSAKKDAMVPMGGLLCMKDDSFFDVYTECRTLCVVQEGFPTYGGLEGGAMERLAVGLYDGMNLDWLAYRIAQVQYLVDGLEEIGVVCQQAGGHAAFVDAGKLLPHIPADQFPAQALACELYKVAGIRAVEIGSFLLGRDPKTGKQLPCPAELLRLTIPRATYTQTHMDFIIEAFKHVKENASNIKGLTFTYEPKVLRHFTAKLKEV

SEQ ID NO: 258 - DNA, 1431 bp, Escherichia coli
atgaaggattatgtaatggaaaactttaaacatctccctgaaccgttccgcattcgtgttattgagccagtaaaacgtaccactcgcgcttatcgtgaagaggcaattattaaatccggtatgaacccgttcctgctggatagcgaagatgtgtttatcgatttactgaccgacagcggcaccggggcggtgacgcagagtatgcaggccgcgatgatgcgcggcgacgaagcttacagcggcagccgcagctactatgcgttagccgagtcagtgaaaaatatctttggttatcaatacaccattccgactcaccagggccgtggtgcagagcaaatctatattccagtactgattaaaaagcgcgagcaggaaaaaggcctggatcgcagcaaaatggtggcgttctctaactatttctttgataccacgcagggccatagccagattaacggctgtaccgtgcgtaacgtctatatcaaagaagccttcgatacgggcgtgcgttacgactttaaaggcaactttgaccttgagggattagaacgcggtattgaagaagttggtccgaataacgtgccgtatatcgttgcaaccatcaccagtaactccgcaggcggtcagccggtttcactggcaaacttaaaagcgatgtacagcatcgcgaagaaatatgatattccggtggtaatggactccgcgcgctttgctgaaaacgcctatttcatcaagcagcgtgaagcagaatacaaagactggaccatcgagcagatcacccgcgaaacctacaaatatgccgatatgctggcgatgtccgccaagaaagatgcgatggtgccgatgggcggcttgctgtgcatgaaagacgacagtttctttgatgtgtacaccgagtgcagaaccctttgcgtagttcaggaaggcttcccgacgtatggcggcctggaaggcggcgcgatggagcgtctggccgtaggtctgtatgacggcatgaatctggactggctggcttatcgtattgcgcaggtgcagtatctggtcgatggtctggaagagattggcgttgtctgccagcaggcgggcggtcacgcggcattcgttgatgccggtaaactgcttccgcatatcccggcagatcagttcccggcacaggcgctggcctgcgagctgtataaagtcgccggtatccgcgcggtagaaattggctctttcctgttaggccgcgatccgaaaaccggtaaacaactgccatgcccggctgaactgctgcgtttaaccattccgcgcgcaacatatactcaaacacatatggacttcattattgaagccttcaaacatgtgaaagagaacgcgtcgaatattaaagggttaacctttacctacgaaccaaaagtattgcgtcacttcaccgcaaaactgaaagaagtttaa

SEQ ID NO: 259 - protein, 630 aa, Escherichia coli
MAIEIKVPDIGADEVEITEILVKVGDKVEAEQSLITVEGDKASMEVPSPQAGIVKEIKVSVGDKTQTGALIMIFDSADGAADAAPAQAEEKKEAAPAAVPEAAAAKDVNVPDIGSDEVEVTEILVKVGDKVEAEQSLITVEGDKASMEVPAPFAGTVKEIKVNTGDKVSTGSLIMVFEVAGEAGAAAPAAKQEAAPAAAPAPAAGVKEVNVPDIGGDEVEVTEVMVKVGDKVAAEQSLITVEGDKASMEVPAPFAGVVKELKVNVGDKVKTGSLIMIFEVEGAAPAAAPAKQEAAAPAPAAKAEAPAAAPAAKAEGKSEFAENDAYVHATPLIRRLAREFGVNLAKVKGTGRKGRILREDVQAYVKEAIKRAEAAPAATGGGIPGMLPWPKVDFSKFGEIEEVELGRIQKISGANLSRNWVMIPHVTHFDKTDITELEAFRKQQNEEAAKRKLDVKITPVVFIMKAVAAALEQMPRFNSSLSEDGQRLTLKKYINIGVAVDTPNGLVVPVFKDVNKKGIIELSRELMTISKKARDGKLTAGEMQGGCFTISSIGGLGTTHFAPIVNAPEVAILGVSKSAMEPVWNGKEFVPRLMLPISLSFDHRVIDGADGARFITIINNTLSDIRRLVM

SEQ ID NO: 260 - DNA, 1893 bp, Escherichia coli
atggctatcgaaatcaaagtaccggacatcggggctgatgaagttgaaatcaccgagatcctggtcaaagtgggcgacaaagttgaagccgaacagtcgctgatcaccgtagaaggcgacaaagcttctatggaagttccgtctccgcaggcgggtatcgttaaagagatcaaagtctctgttggcgataaaactcagaccggcgcactgattatgattttcgattccgccgacggtgcagcagacgctgcacctgctcaggcagaagagaagaaagaagcagctccggcagcagtccccgaggctgccgcggcaaaagacgttaacgttccggatatcggcagcgacgaagttgaagtgaccgaaatcctggtgaaagttggcgacaaagttgaagctgagcagtcgctgatcaccgtagaaggcgataaagcttctatggaagttccggctccgtttgcaggcaccgtgaaagaaatcaaagtgaacaccggcgacaaagtgtctaccggctcgctgattatggtcttcgaagtggcgggtgaagcaggcgcggcagctccggcggctaaacaggaagcggctccggcagcggcccctgcaccagcggctggcgtgaaagaagttaacgttccggatatcggcggtgacgaagttgaagtgaccgaagtgatggtgaaagtgggcgacaaagttgccgctgaacagtcactgattaccgtagaaggcgataaagcttctatggaagttccggctccgtttgcaggcgtcgtgaaggaactgaaagtcaacgttggcgataaagtgaaaactggctcgctgattatgatcttcgaagttgaaggcgcagcgcctgcggcagctcctgcgaaacaggaagcagcagcgccggctccggcagcaaaagctgaagccccggcagcagcaccggctgcgaaagcggaaggcaaatctgaatttgctgaaaatgacgcttacgttcacgcgaccccgctgatccgccgtctggcacgcgagtttggcgttaaccttgcgaaagtgaagggcactggccgtaaaggtcgtatcctgcgcgaagacgttcaggcttacgtgaaagaagctatcaaacgtgcagaagcagctccggcagcgactggcggtggtatccctggcatgctgccgtggccgaaggtggacttcagcaagtttggtgaaatcgaagaagtggaactgggccgtatccagaaaatttctggtgcgaacctgagccgtaactgggtgatgatcccgcatgttactcacttcgacaaaaccgatatcaccgagctggaagcgttccgtaaacagcagaacgaagaagcggcgaaacgtaagctggatgtgaagatcaccccggttgtcttcatcatgaaagccgttgctgcagcgcttgagcagatgcctcgcttcaacagttcgctgtcggaagacggtcagcgtctgaccctgaagaaatacatcaacatcggtgtggcggtggataccccgaacggtctggttgttccggtattcaaagacgtcaacaagaaaggcatcatcgaactgtctcgcgagctgatgactatttctaagaaagcgcgtgacggtaagctgactgcgggcgaaatgcagggcggttgcttcaccatctccagcatcggcggcctgggtactacccacttcgcgccgattgtgaacgcgccggaagtggctatcctcggcgtttccaagtccgcgatggagccggtgtggaatggtaaagagttcgtgccgcgtctgatgctgccgatttctctctccttcgaccaccgcgtgatcgacggtgctgatggtgcccgtttcattaccatcattaacaacacgctgtctgacattcgccgtctggtgatgtaa

SEQ ID NO: 261 - protein, 107 aa, Escherichia coli
MQFSTTPTLEGQTIVEYCGVVTGEAILGANIFRDFFAGIRDIVGGRSGAYEKELRKAREIAFEELGSQARALGADAVVGIDIDYETVGQNGSMLMVSVSGTAVKTRR

SEQ ID NO: 262 - DNA, 324 bp, Escherichia coli
atgcaattttccacaactccaactctggaaggccagaccatcgttgaatattgcggtgtggtgactggcgaagcgattttaggcgcgaatattttccgtgatttctttgctggtattcgcgatatcgttggcggacgctccggtgcctacgaaaaagagctacgtaaagcgcgggagatcgcctttgaggagcttggctcccaggcgcgggcgctgggggccgatgccgtagtcggtattgatatcgactacgaaacggtcgggcaaaacggcagtatgctgatggttagcgtcagcggtacggcggtgaaaacgcgtcgatga

SEQ ID NO: 263 - protein, 101 aa, Escherichia coli
MSKEHTTEHLRAELKSLSDTLEEVLSSSGEKSKEELSKIRSKAEQALKQSRYRLGETGDAIAKQTRVAAARADEYVRENPWTGVGIGAAIGVVLGVLLSRR

SEQ ID NO: 264 - DNA, 306 bp, Escherichia coli
atgtcgaaagaacacactacggaacatctgcgtgctgagttgaaatccctttccgatacgctggaagaggtgcttagctcatctggcgagaagtcgaaagaagagttgagtaagattcgtagcaaagcggagcaggcactgaaacagagccgttatcgcctgggtgaaaccggtgatgccatcgccaaacaaacccgtgtcgcggcggcgcgtgccgatgagtatgtgcgtgaaaatccatggacgggcgtgggcattggcgctgcaatcggtgtagtgctcggcgttctgctgtcgcgtcgttaa

SEQ ID NO: 265 - protein, 157 aa, Escherichia coli
MKYKHLILSLSLIMLGPLAHAEEIGSVDTVFKMIGPDHKIVVEAFDDPDVKNVTCYVSRAKTGGIKGGLGLAEDTSDAAISCQQVGPIELSDRIKNGKAQGEVVFKKRTSLVFKSLQVVRFYDAKRNALAYLAYSDKVVEGSPKNAISAVPVMPWRQ

SEQ ID NO: 266 - DNA, 474 bp, Escherichia coli
atgaaatacaagcatttgatcctgtctttaagcctgataatgctggggccattggctcatgcagaagagattggttcggtcgacaccgtatttaaaatgatcggcccggatcacaaaattgttgtggaagcctttgacgatcccgatgtgaaaaatgtcacctgttatgtgagccgggcgaaaacaggtggtattaaagggggattgggtctggcggaagatacctccgatgcggctatttcttgtcagcaagtcgggccgattgaactgtcggatcgtattaaaaacggcaaagctcagggcgaggtagtattcaaaaaacgcacgtccctggtctttaagtcgttacaggtcgtgcgcttttatgacgccaaacgcaacgcgctcgcttatctggcttactccgacaaagttgtagaaggttcgccgaaaaacgcgattagcgcggttcctgtcatgccgtggcgacaataa

SEQ ID NO: 267 - protein, 426 aa, Escherichia coli
MTEHTSSYYAASANKYAPFDTLNESISCDVCVVGGGYTGLSSALHLAEAGFDVVVLEASRIGFGASGRNGGQLVNSYSRDIDVIEKSYGMDTARMLGSMMFEGGEIIRERIKRYQIDCDYRPGGLFVAMNDKQLATLEEQKENWERYGNKQLEMLDANAIRREVASDRYTGALLDHSGGHIHPLNLAIGEADAIRLNGGRVYELSAVTQIQHTTPAVVRTATGQVTAKYVIVAGNAYLGDKVEPELAKRSMPCGTQVITTERLSDDLARSLIPKNYGVEDCNYLLDYYRLTADNRLLYGGGVVYGARDPDDVERLVVPKLLKTFPQLKGVKIDYRWTGNFLLTLSRMPQFGRLDTNIYYMQGYSGHGVTCTHLAGRLIAELLRGDAERFDAFANLPHYPFPGGRTLRVPFTAMGAAYYSLRDRLGV

SEQ ID NO: 268 - DNA, 1281 bp, Escherichia coli
atgacagaacataccagcagttactacgccgccagtgcgaataaatacgcgccattcgacacgctgaatgagtcaatttcctgcgacgtttgcgtggttggcggcggctataccgggctgtcttccgcactgcatctggcggaagcgggctttgacgtggtggttctggaagcctcacgcatcggctttggcgccagcgggcgcaacggcgggcagcttgtgaactcctacagccgcgacatcgacgttatcgaaaaaagctacggcatggacaccgcccgtatgctcggcagcatgatgttcgaaggtggtgagatcatccgcgaacgtatcaaacgttatcagattgactgcgactaccgccccggcggtctgtttgtggcgatgaatgataaacagctcgccacacttgaagagcagaaagagaactgggaacgctacggcaataaacagctggagatgctggacgccaacgccattcgccgcgaggtcgccagcgatcgctacactggtgcgctgctggatcacagcggcgggcatattcacccgctgaacctcgccattggcgaagcggacgctatccgcctgaacggcgggcgcgtgtatgagctttccgcagtgacgcagatccagcacaccacgcccgccgtagtgcgtacagccacaggtcaggtgacggcgaagtatgtgattgtcgccgggaatgcgtacctgggcgataaagtggagccggaactggcgaaacgcagcatgccgtgcggtacgcaggtgatcaccaccgagcggctttccgatgatttagcccgttcgctgatcccgaaaaactacggcgtggaagactgtaattatctgcttgattactaccgtcttaccgccgacaaccgtttgctgtacggcggcggcgtggtgtacggcgcgcgcgacccggatgacgttgagcgtcttgtggtgccgaaactgctgaaaaccttcccgcagttgaagggcgtgaaaatcgactatcgctggacgggcaacttcctgctgaccctgtcgcgtatgccgcagttcggtcgcctcgataccaacatctattacatgcagggttacagcggccacggcgtcacctgtactcatctcgccggacgtttgattgccgaactgctgcgcggcgacgccgaacgtttcgatgccttcgccaatctgccgcattacccgttccccggcgggcgcacgctgcgcgtaccgtttaccgcgatgggcgcggcgtattacagcctgcgcgatcgtctgggcgtttaa

SEQ ID NO: 269 - protein, 324 aa, Escherichia coli
MQALLLEQQDGKTLASVQTLDESRLPEGDVTVDVHWSSLNYKDALAITGKGKIIRNFPMIPGIDFAGTVRTSEDPRFHAGQEVLLTGWGVGENHWGGLAEQARVKGDWLVAMPQGLDARKAMIIGTAGFTAMLCVMALEDAGVRPQDGEIVVTGASGGVGSTAVALLHKLGYQVVAVSGRESTHEYLKSLGASRILPRDEFAESRPLEKQVWAGAIDTVGDKVLAKVLAQMNYGGCVAACGLAGGFTLPTTVMPFILRNVRLQGVDSVMTPPERRAQAWQRLVADLPESFYTQAAKEISLSEAPNFAEAIINNQIQGRTLVKVN

SEQ ID NO: 270 - DNA, 975 bp, Escherichia coli
atgcaggcgttacttttagaacagcaggacggcaaaactctcgcatcagtacagactctggacgaaagtcgcctgccggagggcgatgtcacggtcgatgttcactggtcgagcctgaactataaagatgcgctggcgattaccggtaagggaaaaatcatccgtaattttccgatgattcctgggatcgattttgccggaactgtacgcaccagcgaagatccgcgttttcatgccggtcaggaggtgttactcactggctggggcgttggtgaaaaccactggggtgggctggcggagcaggcgcgagtgaaaggtgactggctggttgccatgccgcaagggctggacgcgcgtaaagcaatgattatcggtactgccggttttaccgccatgctgtgtgtgatggcgctggaagatgccggtgttcgcccgcaggacggggagattgtcgtgacgggtgccagtggtggcgtcggcagtaccgccgtggcgctgctgcataagttgggttatcaggtcgttgccgtttccggtcgcgaaagtacccatgaatatctgaaaagtttaggtgccagccgtattctccctcgtgatgagtttgccgaatcccgtcctctggaaaaacaagtctgggctggggcaattgacactgttggcgacaaagtgctggcaaaagtgctggcgcaaatgaattacggcggctgcgtggcggcctgtggtctggcgggtggttttactctgccaaccacggtcatgccatttattctgcgtaatgtccgtttgcaaggggtggattcagtaatgacgccaccagaacgccgcgcacaagcctggcagcgactggtcgccgatttaccggaatcattctatacccaggcggcaaaagagatatctctgtcagaggcaccgaactttgccgaggccatcattaataaccagatccagggtcgcacgctggtgaaggttaactaa

SEQ ID NO: 271 - protein, 933 aa, Escherichia coli
  misc_feature (95)..(95): Xaa can be any naturally occurring amino acid
MQNSALKAWLDSSYLSGANQSWIEQLYEDFLTDPDSVDANWRSTFQQLPGTGVKPDQFHSQTREYFRRLAKDASRYSSTISDPDTNVKQVKVLQXINAYRFRGHQHANLDPLGLWQQDKVADLDPSFHDLTEADFQETFNVGSFASGKETMKLGELLEALKQTYCGPIGAEYMHITSTEEKRWIQQRIESGRATFNSEEKKRFLSELTAAEGLERYLGAKFPGAKRFSLEGGDALIPMLKEMIRHAGNSGTREVVLGMAHRGRLNVLVNVLGKKPQDLFDEFAGKHKEHLGTGDVKYHMGFSSDFQTDGGLVHLALAFNPSHLEIVSPVVIGSVRARLDRLDEPSSNKVLPITIHGDAAVTGQGVVQETLNMSKARGYEVGGTVRIVINNQVGFTTSNPLDARSTPYCTDIGKMVQAPIFHVNADDPEAVAFVTRLALDFRNTFKRDVFIDLVCYRRHGHNEADEPSATQPLMYQKIKKHPTPRKIYADKLEQEKVATLEDATEMVNLYRDALDAGDCVVAEWRPMNMHSFTWSPYLNHEWDEEYPNKVEMKRLQELAKRISTVPEAVEMQSRVAKIYGDRQAMAAGEKLFDWGGAENLAYATLVDEGIPVRLSGEDSGRGTFFHRHAVIHNQSNGSTYTPLQHIHNGQGAFRVWDSVLSEEAVLAFEYGYATAEPRTLTIWEAQFGDFANGAQVVIDQFISSGEQKWGRMCGLVMLLPHGYEGQGPEHSSARLERYLQLCAEQNMQVCVPSTPAQVYHMLRRQALRGMRRPLVVMSPKSLLRHPLAVSSLEELANGTFLPAIGEIDELDPKGVKRVVMCSGKVYYDLLEQRRKNNQHDVAIVRIEQLYPFPHKAMQEVLQQFAHVKDFVWCQEEPLNQGAWYCSQHHFREVIPFGASLRYAGRPASASPAVGYMSVHQKQQQDLVNDALNVE

SEQ ID NO: 272 - DNA, 2802 bp, Escherichia coli
atgcagaacagcgctttgaaagcctggttggactcttcttacctctctggcgcaaaccagagctggatagaacagctctatgaagacttcttaaccgatcctgactcggttgacgctaactggcgttcgacgttccagcagttacctggtacgggagtcaaaccggatcaattccactctcaaacgcgtgaatatttccgccgcctggcgaaagacgcttcacgttactcttcaacgatctccgaccctgacaccaatgtgaagcaggtaaaagtcctgcagytcattaacgcataccgyttccgtggtcaccagcatgcgaatctcgatccgctgggactgtggcagcaagataaagtggccgatctggatccgtctttccacgatctgaccgaagcagacttccaggagaccttcaacgtcggttcatttgccagcggcaaagaaaccatgaaactcggcgagctgctggaagccctcaagcaaacctactgcggcccgattggtgccgagtatatgcacattaccagcaccgaagaaaaacgctggatccaacagcgtatcgagtctggtcgcgcgactttcaatagcgaagagaaaaaacgcttcctaagcgaactgaccgccgctgaaggccttgaacgttacctcggtgcaaaattccctggcgcaaaacgcttctcgctggaaggcggtgacgcgttaatcccgatgcttaaagagatgattcgccacgctggcaacagcggcacccgcgaagtggttctcgggatggcgcaccgtggtcgtctgaacgtgctggtgaacgtgctgggtaaaaaaccgcaagacttgttcgacgagtttgccggtaaacataaagaacacctcggcacgggtgacgtgaaataccacatgggcttctcgtctgacttccagaccgatggcggcctggtacatctggcgctggcgtttaacccgtctcaccttgagattgtcagcccggtcgttatcggttctgttcgtgcccgtctggacagacttgatgagccgagcagcaacaaagtgctgccaatcaccattcacggtgacgccgcagtgaccgggcagggcgtggttcaggaaactctgaacatgtcgaaagcgcgtggttatgaagttggcggtacggtacgtatcgttatcaacaaccaggttggcttcaccacctctaacccgctggatgcccgttcaacgccgtactgtactgatatcggtaagatggttcaggcaccgatttttcacgttaacgcggatgatccggaagccgttgcctttgtgacccgtctggcgctcgatttccgtaacacctttaaacgtgatgtcttcatcgacctggtgtgctaccgccgtcacggccacaacgaagccgacgagccgagcgcaacccagccgctgatgtatcagaaaatcaaaaaacatccgacgccgcgcaaaatctatgctgacaagctggagcaggaaaaagtggcgacgctggaagatgccaccgagatggttaacctgtaccgcgatgcgctggatgctggcgattgcgtagtggcagagtggcgtccgatgaacatgcactctttcacctggtcgccgtacctcaaccacgaatgggacgaagagtacccgaataaagttgagatgaagcgcctgcaggagctggcgaaacgcatcagcacggtgccggaagcggttgaaatgcagtctcgcgttgccaaaatttatggcgatcgccaggcgatggctgccggtgagaaactgttcgactggggcggcgcggaaaacctcgcttacgccacgctggttgacgaaggcattccggttcgcctgtcgggtgaagactccggtcgcggtaccttcttccaccgccacgcggtgatccacaaccagtctaacggttccacttacacgccgctgcaacacatccataacggccagggcgcgttccgtgtctgggactccgtactttctgaagaagcagtgctggcgtttgaatacggttatgccaccgcagaaccacgcactctgactatctgggaagctcagttcggtgacttcgccaacggtgcgcaggtggttatcgaccagttcatctcctctggcgaacagaaatggggccggatgtgtggtctggtgatgttgctgccgcacggttacgaagggcaggggccggagcactcctccgcgcgtctggaacgttatctgcaactttgtgctgagcaaaacatgcaggtgtgcgtaccgtctaccccggcacaggtttaccacatgctgcgtcgtcaggcgctgcgcgggatgcgtcgtccgctggtcgtgatgtcgccgaaatccctgctgcgtcatccgctggcggtttccagcctcgaagaactggcgaacggcaccttcctgccagccatcggtgaaatcgacgagcttgatccgaagggcgtgaagcgcgtagtgatgtgttctggtaaggtttattacgacctgctggaacagcgtcgtaagaacaatcaacacgatgtcgccattgtgcgtatcgagcaactctacccgttcccgcataaagcgatgcaggaagtgttgcagcagtttgctcacgtcaaggattttgtctggtgccaggaagagccgctcaaccagggcgcatggtactgcagccagcatcatttccgtgaagtgattccgtttggggcttctctgcgttatgcaggccgcccggcctccgcytctccggcggtagggtatatgtccgttcaccagaaacagcaacaagatctggttaatgacgcgctgaacgtcgaataa

SEQ ID NO: 273 - protein, 694 aa, Escherichia coli
MESKRLDNAALAAGISPHYINAHGKPQSISAETKRRLLDAMHQRTATKVAVTPVPNVMVYTSGKKMPMVVEGSGEYSWLLTTEEGTQYKGHITGGKAFNLPTKLPEGYHTLTLTQEDQRGHCRVIVAPKRCYEPQALLNKQKLWGACVQLYTLRSEKNWGIGDFGDLKAMLVDVAKRGGSFIGLNPIHALYPANPESASPYSPSSRRWLNVIYIDVNAVEDFHLSEEAQAWWQLPTTQQTLQQARDADWVDYSTVTALKMTALRMAWKGFAQRDDEQMAAFRQFVADQGDSLFWQAAFDALHAQQVKEDEMRWGWPAWPEMYQNVDSPEVRQFCEEHRDDVDFYLWLQWQAYSQFAACWEISQGYEMPIGLYRDLAVGVAEGGAETWCDRELYCLKASVGAPPDILGPLGQNWGLPPMDPHIITARAYEPFIELLRANMQNCGALRIDHVMSMLRLWWIPYGETADQGAYVHYPVDDLLSILALESKRHRCMVIGEDLGTVPVEIVGKLRSSGVYSYKVLYFENDHEKTFRAPKAYPEQSMAVAATHDLPTLRGYWESGDLTLGKTLGLYPDEVVLRGLYQDRELAKQGLLDALHKYGCLPKRAGHKASLMSMTPTLNRGLQRYIADSNSALLGLQPEDWLDMAEPVNIPGTSYQYKNWRRKLSATLETMFADDGVNKLLKDLDRRRRAAAKKK

SEQ ID NO: 274 - DNA, 2085 bp, Escherichia coli
atggaaagcaaacgtctggataatgccgcgctggcggcggggattagccctcattacatcaatgcccacggtaaaccgcagtcgattagcgccgaaaccaaacggcgtttgcttgacgcgatgcatcaacgtaccgccacgaaagtggcggtaacgccagtcccgaatgtcatggtttataccagcggcaaaaaaatgccgatggtggtggagggcagcggcgaatatagctggctgctgaccaccgaagaaggaacgcagtacaaaggccatataacggggggcaaagcgttcaatctaccgacgaagctgccggaaggttatcacacgctgacgcttacccaggaagaccagcgcgggcattgcagggtgattgtcgccccgaaacgctgttacgaaccgcaggcgttgctgaataaacaaaagctgtggggtgcctgcgtccagctttatacgctgcgatcggaaaaaaactggggtattggggattttggcgatctcaaagcgatgctagtggatgtggcaaaacgtggcggatcgttcattggtctgaacccgattcatgcgctctatccggcaaatccggagagcgccagcccgtatagcccgtcttctcgccgctggctgaatgtgatttatatcgacgttaacgccgtcgaagatttccatcttagcgaagaggctcaggcctggtggcagttgccgaccacgcaacagacgctgcaacaggcgcgggatgccgactgggtcgattactccacggttaccgccctaaaaatgacagcattacgaatggcgtggaaaggtttcgcgcaacgtgatgatgagcagatggccgcgtttcgccagtttgttgcagatcaaggcgacagcctgttctggcaggcagcctttgatgcgctacatgcccagcaagtgaaagaggacgaaatgcgctggggctggcctgcatggccagagatgtatcagaacgtggattcaccagaagtgcgtcagttctgcgaagaacatcgcgatgacgttgatttttatctctggttgcagtggcaggcttacagccagtttgccgcctgctgggagataagccagggctatgaaatgccgattggcttgtatcgtgatctggcggttggcgtagcggaaggtggggcggaaacctggtgcgaccgtgaactgtattgcctgaaagcgtcggttggcgcgccgccggatatcctcggcccgttggggcagaactggggattgccgccaatggacccgcatatcatcaccgcgcgtgcttatgaaccgtttatcgagctgttgcgtgccaatatgcaaaactgcggcgcattacgaattgaccatgtgatgtcgatgctgcgtttgtggtggataccgtatggcgagacggcagatcagggcgcgtatgttcactatccggtggatgatctgctctcgattctggcactcgaaagtaaacgtcatcgctgtatggtgattggtgaagatctcggtaccgtaccggtagagattgtcggtaagctgcgcagcagcggtgtgtactcctacaaagtgctctatttcgaaaacgaccacgagaagacgttccgtgcaccgaaagcgtatccggagcagtcgatggcggttgcggcgacacatgacctgcctacgctacgcggctactgggagagcggggatctaacgctgggcaaaaccctggggctgtatccggatgaagtggtactgcgcggtctgtatcaggatcgcgaactggcgaagcaagggctgctggatgcactgcataaatatggttgtctgccaaaacgtgccgggcataaggcatcgttgatgtcgatgacgccgacgcttaatcgtggtttgcagcgctacattgccgacagtaacagtgctctgttaggactacagccggaagactggctggatatggccgaaccggtgaatattcctggcaccagttaccagtataaaaactggcgacgcaagctttccgcaacgcttgagacgatgtttgccgatgatggcgtgaacaagttgctgaaggatttggacagacggcgcagagctgcagcgaagaagaagtag

SEQ ID NO: 275 - protein, 147 aa, Escherichia coli
METLTAISRWLAKQHVVTWCVQQEGELWCANAFYLFDVQKVAFYILTEEKTRHAQMSGPQAAVAGTVNGQPKTVALIRGVQFKGEIRRLEGEESDLARKAYNRRFPVARMLSAPVWEIRPDEIKFTDNTLGFGKKMIWLRGSGTEQA

SEQ ID NO: 276 - DNA, 444 bp, Escherichia coli
atggaaacactcaccgccatcagccgttggctggcaaaacaacatgttgtcacctggtgtgtgcagcaggaaggggaactctggtgcgccaatgccttttatctgtttgatgtgcagaaagtcgccttctacattttgacggaagaaaaaacgcgccacgcgcagatgagtgggccgcaggctgcggttgccggaacggtaaacggtcagccgaaaacggtagcgttaattcgcggcgtgcagtttaaaggtgagatccgcaggctggaaggtgaggaaagcgacctcgcgcgcaaggcgtacaatcgtcgctttccggttgccagaatgctgtcggccccggtgtgggaaatccggcccgatgaaatcaaattcaccgacaacacgctgggctttggtaaaaaaatgatttggctacgcggctcaggcaccgagcaggcgtaa

SEQ ID NO: 277 - protein, 143 aa, Escherichia coli
MTIHKKGQAHWESDIKRGKGTVSTESGVLNQQPYGFNTRFEGEKGTNPEELIGAAHAACFSMALSLMLGEAGFTPTSIDTTADVSLDKVDAGFAITKIALKSEVAVPGIDASTFDGIIQKAKAGCPVSQVLKAEITLDYQLKS

SEQ ID NO: 278 - DNA, 432 bp, Escherichia coli
atgacaatccataagaaaggtcaggcacactgggaaagcgatatcaaacgcgggaagggaacagtatccaccgagagtggcgtgctgaaccaacagccgtatggatttaacacgcgttttgaaggcgaaaaaggaaccaaccctgaagaactgattggcgcagcgcatgccgcatgtttctcaatggcgctttcattaatgctgggggaagcgggattcacgccaacatcgattgataccaccgccgatgtgtcgctggataaagtggatgccggttttgcgattacgaaaatcgcactgaagagtgaagttgcggtgccgggtattgatgcctctacctttgacggcatcatccagaaagcaaaagcaggatgcccggtctctcaggtactgaaagcggaaattacgctggattaccagttgaaatcgtaa

SEQ ID NO: 279 - protein, 137 aa, Escherichia coli
MSEALKILNNIRTLRAQARECTLETLEEMLEKLEVVVNERREEESAAAAEVEERTRKLQQYREMLIADGIDPNELLNSLAAVKSGTKAKRAQRPAKYSYVDENGETKTWTGQGRTPAVIKKAMDEQGKSLDDFLIKQ

SEQ ID NO: 280 - DNA, 414 bp, Escherichia coli
atgagcgaagcacttaaaattctgaacaacatccgtactcttcgtgcgcaggcaagagaatgtacacttgaaacgctggaagaaatgctggaaaaattagaagttgttgttaacgaacgtcgcgaagaagaaagcgcggctgctgctgaagttgaagagcgcactcgtaaactgcagcaatatcgcgaaatgctgatcgctgacggtattgacccgaacgagctgctgaatagccttgccgccgttaaatctggcaccaaagctaaacgtgctcagcgtccggcaaaatatagctacgttgacgaaaacggcgaaactaaaacctggactggccagggccgtactccagctgtaatcaaaaaagcaatggatgagcaaggtaaatccctcgacgatttcctgatcaagcaataa

SEQ ID NO: 281 - protein, 157 aa, Escherichia coli
MNYEIKQEDKRTVAGFHLVGPWEQTVKKGFEQLMMWVDSKNIVPKEWVAVYYDNPDETPAEKLRCDTVVTVPNNFTLPENSEGVILTEISGGQYAVAVARVVGDDFAKPWYQFFNSLLQDSAYEMLPKPCFEVYLNNGAEDGYWDIEMYVAVQPKHH

SEQ ID NO: 282 - DNA, 474 bp, Escherichia coli
atgaactacgagattaagcaggaagataaacgtaccgttgcaggtttccatctcgttggcccgtgggaacagacggtaaagaaaggttttgagcagttgatgatgtgggtagatagcaaaaatattgtgccgaaggagtgggttgctgtctattacgacaatccggatgaaacacccgccgaaaaattacgctgcgacaccgtcgtgacggtaccgaataactttacgctccccgaaaacagtgagggcgtcattctgacagaaatttcaggtggtcaatatgcggtggcggtggctcgtgtagtcggtgatgattttgctaaaccctggtatcagttctttaatagcctcttgcaggacagtgcttatgaaatgttaccaaagccctgcttcgaggtttacttgaacaatggcgcggaagatgggtactgggatatcgaaatgtatgttgcggtgcagccaaaacatcactaa

SEQ ID NO: 283 - protein, 475 aa, Escherichia coli
MNTALAQQIANEGGVEAWMIAQQHKSLLRFLTCGSVDDGKSTLIGRLLHDTRQIYEDQLSSLHNDSKRHGTQGEKLDLALLVDGLQAEREQGITIDVAYRYFSTEKRKFIIADTPGHEQYTRNMATGASTCELAILLIDARKGVLDQTRRHSFISTLLGIKHLVVAINKMDLVDYSEETFTRIREDYLTFAGQLPGNLDIRFVPLSALEGDNVASQSESMPWYSGPTLLEVLETVEIQRVVDAQPMRFPVQYVNRPNLDFRGYAGTLASGRVEVGQRVKVLPSGVESNVARIVTFDGDREEAFAGEAITLVLTDEIDISRGDLLLAADEALPAVQSASVDVVWMAEQPLSPGQSYDIKIAGKKTRSRVDGIRYQVDINNLTQREVENLPLNGIGLVDLTFDEPLVLDRYQQNPVTGGLIFIDRLSNVTVGAGMVHEPVSQATAAPSEFSAFELELNALVRRHFPHWGARDLLGEK

SEQ ID NO: 284 - DNA, 1428 bp, Escherichia coli
atgaacaccgcacttgcacaacaaatcgccaatgaaggcggcgtcgaagcctggatgattgcgcaacaacataaaagcctgctgcgttttctgacctgtggtagcgtcgatgacggcaaaagtaccctgattggtcgtctgttgcacgatacccgccaaatctatgaagatcagctctcatcgctgcataatgacagtaagcgtcacggcacccagggcgaaaagctggatctggctctgctggtggacggcctgcaagctgagcgtgaacagggcatcaccattgacgtggcctaccgctatttctctaccgagaagcgtaaatttattatcgccgacactccagggcacgagcagtacacccgcaatatggcgactggcgcatcgacatgtgaactggcgatcttactgatcgatgcccgtaaaggcgtgctcgatcaaacccgtcgtcacagttttatctccacactgttggggatcaaacatctggtcgtggcgatcaacaaaatggatctggtggattacagtgaagagacgttcacccgtattcgtgaagattatctgacctttgccgggcagctgccgggtaatctggatatccgctttgtgccgctctccgcactggaaggtgacaacgtggcttcgcaaagtgaaagtatgccgtggtacagcggtccgacactgctcgaagtgctggaaaccgtggagattcagcgagtggtggatgcccagccaatgcgcttcccggtgcagtacgttaaccgcccaaatctcgattttcgtggctacgccggaacgctggcatccggtcgcgtggaagtcgggcaacgtgtaaaagtgctgccctctggtgtggaatcaaacgtcgcgcggatcgtgacttttgatggtgatcgcgaagaagcctttgccggagaagctatcaccctggtgctgacggatgagatcgacatcagccgtggcgatctgctgctggcggcagacgaagcgttaccagctgtgcagagcgcgtcggtggatgtggtatggatggcggaacagccgctttccccgggccagagttacgacatcaaaattgccggtaagaagacgcgttctcgtgttgatggcattcgttatcaggttgatattaataaccttacccaacgcgaagttgaaaacctgccgctgaacggcatcggcctggtggatctcacttttgacgagccactggtgttagatcgttatcagcaaaacccggttaccggtgggctgatttttatcgatcgcctgagcaatgtgaccgtaggtgccggtatggtgcatgagccagttagccaggcaactgctgcgccatctgaatttagtgcattcgaactggaattgaatgccctggttcgccgccactttccacactggggcgcgcgcgatttgctgggggagaaataa

SEQ ID NO: 285 - protein, 222 aa, Escherichia coli
MPSLSKEAALVHEALVARGLETPLRPPVHEMDNETRKSLIAGHMTEIMQLLNLDLADDSLMETPHRIAKMYVDEIFSGLDYANFPKITLIENKMKVDEMVTVRDITLTSTCEHHFVTIDGKATVAYIPKDSVIGLSKINRIVQFFAQRPQVQERLTQQILIALQTLLGTNNVAVSIDAVHYCVKARGIRDATSATTTTSLGGLFKSSQNTRHEFLRAVRHHN

SEQ ID NO: 286 - DNA, 669 bp, Escherichia coli
atgccatcactcagtaaagaagcggccctggttcatgaagcgttagttgcgcgaggactggaaacaccgctgcgcccgcccgtgcatgaaatggataacgaaacgcgcaaaagccttattgctggtcatatgaccgaaatcatgcagctgctgaatctcgacctggctgatgacagtttgatggaaacgccgcatcgcatcgctaaaatgtatgtcgatgaaattttctccggtctggattacgccaacttcccgaaaatcaccctcattgaaaacaaaatgaaggtcgatgaaatggtcaccgtgcgcgatatcactctgaccagtacctgtgaacaccattttgttaccatcgatggcaaagcgacggtggcttatatcccgaaagattcggtgatcggtctgtcaaaaattaaccgtattgtgcagttctttgcccagcgtccgcaggtgcaggaacgtctgacgcagcaaattctcattgcgctacaaacgctgctgggcaccaataacgtggctgtctctatcgacgcggtgcattattgcgtgaaggcgcgtggcatccgcgatgcaaccagtgccacgacaacgacctctcttggtggattgttcaaatccagtcagaatacgcgccacgagtttctgcgcgctgtgcgtcatcacaactga

SEQ ID NO: 287 - protein, 250 aa, Escherichia coli
MAVTKLVLVRHGESQWNKENRFTGWYDVDLSEKGVSEAKAAGKLLKEEGYSFDFAYTSVLKRAIHTLWNVLDELDQAWLPVEKSWKLNERHYGALQGLNKAETAEKYGDEQVKQWRRGFAVTPPELTKDDERYPGHDPRYAKLSEKELPLTESLALTIDRVIPYWNETILPRMKSGERVIIAAHGNSLRALVKYLDNMSEEEILELNIPTGVPLVYEFDENFKPLKRYYLGNADEIAAKAAAVANQGKAK

SEQ ID NO: 288 - DNA, 753 bp, Escherichia coli
atggctgtaactaagctggttctggttcgtcatggcgaaagtcagtggaacaaagaaaaccgtttcaccggttggtacgacgtggatctgtctgagaaaggcgtaagcgaagcaaaagcagcaggtaagctgctgaaagaggaaggttacagctttgactttgcttacacctctgtgctgaaacgcgctatccataccctgtggaatgtgctggacgaactggatcaggcatggctgcccgttgagaaatcctggaaactgaacgaacgtcactacggtgcgttgcagggtctgaacaaagcggaaactgctgaaaaatatggcgacgagcaggtgaaacagtggcgtcgtggttttgcagtgactccgccggaactgactaaagatgatgagcgttatccgggtcacgatccgcgttacgcgaaactgagcgagaaagaactgccgctgacggaaagcctggcgctgaccattgaccgcgtgatcccttactggaatgaaaccattctgccgcgtatgaagagcggtgagcgcgtaatcatcgctgcacacggtaactcgttacgtgcgctggtgaaatatctcgataacatgagcgaagaagagattcttgagctgaatatcccgaccggcgtgccgctggtttatgagtttgacgagaacttcaaaccgctgaaacgctattatctgggtaatgctgacgagatcgcggcgaaagcagcagccgttgcgaaccagggtaaagcgaagtaa

SEQ ID NO: 289 - protein, 144 aa, Escherichia coli
MSLREALEKAEEAGVDLVEISPNAEPPVCRIMDYGKFLYEKSKSSKEQKKKQKVIQVKEIKFRPGTDEGDYQVKLRSLIRFLEEGDKAKITLRFRGREMAHQQIGMEVLNRVKDDLQELAVVESFPTKIEGRQMIMVLAPKKKQ

SEQ ID NO: 290 - DNA, 435 bp, Escherichia coli
gtgagtctgagagaagctctggagaaagcagaagaagccggagtagacttagtcgagatcagccctaacgccgagccgccggtttgtcgtataatggattacggcaaattcctctatgaaaagagcaagtcttctaaggaacagaagaaaaagcaaaaagttatccaggttaaggaaattaaattccgtcctggtacagatgaaggcgactatcaggtaaaactccgcagcctgattcgctttctcgaagagggtgataaagccaaaatcacgctgcgtttccgcggtcgtgagatggcgcaccagcaaatcggtatggaagtgcttaatcgcgtgaaagacgatttgcaagaactggcagtggtcgaatccttcccaacgaagatcgaaggccgccagatgatcatggtgctcgctcctaagaagaaacagtaa

SEQ ID NO: 291 - protein, 94 aa, Escherichia coli
MTKSELIERLATQQSHIPAKTVEDAVKEMLEHMASTLAQGERIEIRGFGSFSLHYRAPRTGRNPKTGDKVELEGKYVPHFKPGKELRDRANIYG

SEQ ID NO: 292 - DNA, 285 bp, Escherichia coli
atgaccaagtcagaattgatagaaagacttgccacccagcaatcgcacattcccgccaagacggttgaagatgcagtaaaagagatgctggagcatatggcctcgactcttgcgcagggcgagcgtattgaaatccgcggtttcggcagtttctctttgcactaccgcgcaccacgtaccggacgtaatccgaagactggcgataaagtagaactggaaggaaaatacgttcctcactttaaacctggtaaagaactgcgcgatcgcgccaatatttacggttaa

SEQ ID NO: 293 - protein, 225 aa, Escherichia coli
MPVKLAQALANPLFPALDSALRSGRHIGLDELDNHAFLMDFQEYLEEFYARYNVELIRAPEGFFYLRPRSTTLIPRSVLSELDMMVGKILCYLYLSPERLANEGIFTQQELYDELLTLADEAKLLKLVNNRSTGSDIDRQKLQEKVRSSLNRLRRLGMVWFMGHDSSKFRITESVFRFGADVRAGDDPREAQRRLIRDGEAMPIENHLQLNDETEENQPDSGEEE

SEQ ID NO: 294 - DNA, 678 bp, Escherichia coli
atgccggttaagctggcgcaggcgctggcgaatccgttatttccggcgctggacagcgccttacgttcaggccgccatattggcctcgacgaactggataatcatgcattcctgatggattttcaggaatatctggaagagttttacgcgcgttataacgttgagcttattcgtgcaccggaagggttcttctatttacgtccacgttccaccacgctgatccctcgttccgtcttgtcggaactggatatgatggtcgggaaaatcctctgttatctctatctcagcccggaacggctggcgaatgaggggattttcacccagcaggaactgtacgacgaactgctcaccctggccgatgaagcgaaactgctgaaactggtgaacaaccgttcaaccggttcagacattgaccgtcagaagttgcaggaaaaagtacgttcttcgctcaaccgtctgcgtcgtttaggtatggtgtggtttatgggccacgacagcagcaagttccgcattaccgaatcggtgttccgcttcggagccgatgtgcgtgctggcgacgatccccgtgaagcacagcgtcgcctgattcgtgatggcgaagcaatgccgattgaaaatcatctgcaactcaacgatgaaaccgaagagaatcagccagatagcggagaggaagaataa

SEQ ID NO: 295 - protein, 540 aa, Escherichia coli
  misc_feature (270)..(270): Xaa can be any naturally occurring amino acid
MRVNNGLTPQELEAYGISDVHDIVYNPSYDLLYQEELDPSLTGYERGVLTNLGAVAVDTGIFTGRSPKDKYIVRDDTTRDTFWWADKGKGKNDNKPLSPETWQHLKGLVTKQLSGKRLFVVDAFCGANPDTRLSVRFITEVAWQAHFVKNMFIRPSDEELAGFKPDFIVMNGAKCTNPQWKEQGLNSENFVAFNLTERMQLIGGTWYGGEMKKGMFSMMNYLLPLKGIASMHCSANVSEKGDVAVFFGLSGTGKTTLSTDPKRRLIGDDXHGWDDDGVFNFEGGCYAKTIKLSKEAEPEIYNAIRRDALLENVTVREDGTIDFDDGSKTENTRVSYPIYHIDNIVKPVSKAGHATKVIFLTADAFGVLPPVSRLTADQTQYHFLSGFTAKLAGTERGITEPTPTFSACFGAAFLSLHPTQYAEVLVKRMQAAGAQAYLVNTGWNGTGKRISIKDTRAIIDAILNGSLDNAETFTLPMFNLAIPTELPGVDTKILDPRNTYASPEQWQEKAETLAKLFIDNFDKYTDTPAGAALVAAGPKL

SEQ ID NO: 296 - DNA, 1623 bp, Escherichia coli
atgcgcgttaacaatggtttgaccccgcaagaactcgaggcttatggtatcagtgacgtacatgatatcgtttacaacccaagctacgacctgctgtatcaggaagagctcgatccgagcctgacaggttatgagcgcggggtgttaactaatctgggtgccgttgccgtcgataccgggatcttcaccggtcgttcaccaaaagataagtatatcgtccgtgacgataccactcgcgatactttctggtgggcagacaaaggcaaaggtaagaacgataacaaacctctctctccggaaacctggcaacatctgaaaggcctggtgaccaaacagctttccggcaaacgtctgttcgttgtcgacgccttctgtggtgcgaacccggatactcgtctttccgtccgtttcatcaccgaagtggcctggcaggcgcattttgtcaaaaacatgtttattcgcccgagcgatgaagagttggcaggtttcaaaccagactttatcgttatgaacggcgcgaagtgcactaacccgcagtggaaagaacagggtctgaattccgaaaacttcgtggcttttaacctgaccgagcgcatgcagctgattggcggcacctggtatggcggcgaaatgaagaaagggatgttctcgatgatgaactacctgctgccgctgaaaggtatcgcttctatgcactgctccgccaacgttagcgagaaaggcgatgttgcggtgttcttcggcctttccggcaccggtaaaaccaccctttccaccgacccgaaacgtcgcctgattggcgatgackaacacggctgggacgatgacggcgtgtttaacttcgaaggcggctgctacgcaaaaactatcaagctgtcgaaagaagcggaacctgaaatctacaacgctatccgtcgcgatgcgctgctggaaaacgtcaccgtgcgtgaagatggcactatcgactttgatgatggttcaaaaaccgagaacacccgcgtttcttatccgatctatcacatcgataacatcgttaagccggtttcaaaagcgggtcacgcaacgaaagttatcttcctgaccgcagacgcctttggtgtgctgccaccggtttctcgtctgactgccgatcaaacccagtaccacttcctctctggcttcaccgccaaactggccggtactgagcgtggcatcaccgaaccgacgccaaccttctccgcttgcttcggcgcggcattcctgtcgctgcacccgactcagtacgcagaagtgctggtgaaacgtatgcaggcggcgggcgcgcaggcttatctggttaacactggctggaacggcactggcaaacgtatctcgattaaagatacccgcgccattatcgacgccatcctcaacggttcgctggataatgcagaaaccttcactctgccgatgtttaacctggcgatcccaaccgaactgccgggcgtagacacgaagattctcgatccgcgtaacacctacgcttccccggaacagtggcaggaaaaagccgaaaccctggcgaaactgtttatcgacaactttgataaatacaccgacacccctgcgggtgccgcgctggtagcggctggtccgaaactgtaa

SEQ ID NO: 297 - protein, 39 aa, Escherichia coli
MKAGQNAMDATVLEITKDGVRVQLNSGMSLIVRAEHLVF

SEQ ID NO: 298 - DNA, 120 bp, Escherichia coli
gtgaaagcgggtcaaaacgcgatggatgccaccgtattagaaatcaccaaagacggcgtccgcgtccagctgaattcgggtatgtctttgattgtgcgcgcagaacacctggtgttctga

SEQ ID NO: 299 - protein, 937 aa, Escherichia coli
  misc_feature (557)..(557): Xaa can be any naturally occurring amino acid
  misc_feature (570)..(570): Xaa can be any naturally occurring amino acid
MDSNRKSYNNEIFNNFSFDKSVKLNSYNYIADDIEQVIDKGSKVQLEVYNLLSEEKIFEHKIMNNWTRSIKNILTTYLFMSSGAVTARNVQTFSPTINNESRIRLPRALPVGHPYPEEHKASGFSPFMMGGLSGDILPEILTGNGPSIFFNGKHNNQHDGAFGKIIDFTQNGNKISAKDKEIIKRYIFDKINVLIKEYFIRTGKNSHTPFEVFIKERLFNQYDIFKTLARDILAHPLVIYDAGYKNYHESLNAAIAINSRPLQEIHYGDVLYHYHKNDISLGVDTLYGRESFDIVLDAMNVYRKSKKMRVISNNEMKKSIKISELVIHNIIKKGLTNCLLKKDVLNARYDLIRDILRYSLNIRQGIKHDDVNRIAENIIKKYGITEGMNPKPRNARISKELLLLAVDRQIEWAKKHFITKDVLENVVSKCDLSSIFNVNKVLQNTILEFVHEINNISSARWMSKSEKNNKQKEAIEKFKKEVSHMNGGQQFIWGFDKVIQEGLSGLIELSIDINDSTNHRDKSSLSPDGRAVLHFLGTIWNMAMGAVPGYNALSGVXSILHSAIVKESSXICDYIQGAVRIGMDFVPGTRSDLHSRSLQIKYEALKHIEKNINDNIIYHPSNNANFYSVIESIDGNDFIYNEKQSKILEMKQDRGGNRYSAVDLNSSKYGYYEKVGGGFYRYIESFNPISSETPNKIVYKGESVDLTKEPNSELYSGRYSINNKQVNVYFFRDADGTFYKSEGLHGGGVIRYIDKPYSQLREGDIGYDEDLLDIYDDSPVLEDTLPALSSEIVPTPEHSIKQIYSKIKEGHIELSDSDIILCRGTTGIQAENIVEYKTAGGLPDSNPNVKAPDEYMAQQQVRIGRILPEYTSDLSVADRFSREHYLIVVKVKAKYITRGSVTESGWVIDKTAPVEPLAIIDRTFGMKENISMVNASK

SEQ ID NO: 300 - DNA, 2814 bp, Escherichia coli
ttggatagcaatagaaaatcatacaataatgaaatttttaacaatttctcttttgataagtctgtaaagttgaattcatataactatattgcagatgatatagagcaagtaatcgataaaggaagcaaagttcaattggaggtatataatttattatccgaagaaaagatatttgaacataaaattatgaataattggacaaggagcataaaaaatatattgacgacatatttgtttatgtcatcaggagcggtgacagccagaaatgttcaaaccttttctccaacaataaataatgagtcaaggattcgattgccgagagcattgccagtaggccatccatatcctgaggaacataaggcttctggtttctccccttttatgatgggggggctgagtggtgatattcttccggaaattttaacggggaatggaccatctatattttttaacggaaaacataataaccaacatgatggagcttttggaaaaataatagattttacccaaaatggaaataaaataagtgcaaaagataaagaaataataaaaagatatatttttgataagatcaatgttttgattaaagagtatttcattagaactggtaaaaattctcataccccatttgaagtttttataaaggagcgattatttaatcaatatgatatttttaaaacattggctagagatatattggcacacccattagtaatatatgatgcgggttacaaaaattatcatgagtcattaaatgctgctattgcaataaactctagaccattacaagaaatacattatggtgatgttttatatcattatcataaaaatgacatctctttgggagtagatactctttacgggagggaaagttttgatattgtactggatgcaatgaacgtatatagaaaaagcaaaaaaatgagagttatttccaataatgagatgaaaaaaagcattaaaatatctgaattagttatccataatattataaagaaaggattgactaattgtttgcttaaaaaggatgttcttaatgccagatatgatcttattagagatattcttcgatattctttaaatatacgacagggaattaaacatgatgatgttaatagaatagcggaaaatataataaaaaagtatggtataactgagggtatgaatcctaaacctaggaatgccagaatatctaaagaattgcttttattagctgttgatagacagattgagtgggcgaaaaaacattttataacaaaagatgtattggaaaatgttgtgtcaaaatgtgatttatcatctatctttaatgttaataaagtgcttcagaatactattcttgagtttgtccatgaaattaataatatatcatctgctcgctggatgtcaaaatcagaaaagaataataaacaaaaagaggcaatagaaaagttcaaaaaagaagtatcccatatgaatggcgggcagcagtttatttgggggtttgataaggttattcaagaaggcttaagtggattgattgagttaagtatcgatattaatgatagtacaaatcatcgtgataagtcttctctttctcctgatgggagagctgtgttacattttttaggtacaatttggaatatggcgatgggagctgtacctggttataatgcattgtctggkgtaagkagcattttacatagtgctatagtaaaagaatctagcmatatctgtgattatattcagggggctgtacgtattggaatggactttgttccaggcactcgctctgacttacatagccgttcgctgcagataaaatatgaggctttgaagcatatagaaaaaaacattaatgataatattatttatcatccgagtaataatgctaatttctattctgtaattgagtcaattgatggtaatgactttatatataacgaaaaacaatctaaaatattagaaatgaaacaggatcgtggggggaatagatatagtgcagtagatcttaactcttctaagtatgggtattatgagaaagttggcggtggtttttatagatatatagaatcctttaaccccatatcttcagagacaccaaataaaatagtctacaagggggaatcagtagatttaactaaggagccaaattcggaattatattcaggtaggtattctataaataacaaacaggttaatgtttatttctttcgtgacgctgatggtacattttataaatcagaaggtcttcatggtgggggagttattagatacatagataaaccgtattctcagttaagagaaggagatattgggtatgatgaggatttgttggatatatacgatgattctccggtgcttgaagacacgttgcctgctttatcttctgaaatagtaccaactccagaacatagtattaaacaaatttattcgaaaattaaggaggggcacatagaactgtccgattcagacatcatattgtgtcgcggcacaaccggtattcaagctgaaaatatcgttgaatataaaactgctggagggcttcctgattcaaatccaaatgtaaaagcaccagatgaatatatggcacaacagcaggtacgtattggaagaatattgcctgaatacacatcggatcttagcgttgctgatcggtttagtcgtgagcattatctaatagttgttaaagtaaaggcaaaatatatcacacgaggaagtgttacagagagtggttgggttatagataagaccgcacctgttgaaccacttgcgataattgatagaacttttggtatgaaggaaaatatctcaatggtaaatgcatcgaaatag

SEQ ID NO: 301 - protein, 149 aa, Escherichia coli
  misc_feature (25)..(25): Xaa can be any naturally occurring amino acid
MGLFNFVKDAGEKLWDAVTGQHDKXDQAKKVQEHLSKTGIPDADKVNIQIADGKATVTGDGLSQEAKEKILVAVGNISGIASVDDQVKTATPATASQFYTVKSGDTLSAISKQVYGNANLYNKIFEANKPMLKSPDKIYPGQVLRIPEE

SEQ ID NO: 302 - DNA, 450 bp, Escherichia coli
atgggtctgttcaattttgtgaaagatgccggagaaaaactctgggacgcggttacaggtcagcacgataaasatgatcaggcgaagaargtgcaggagcatctgagcaaaaccggtatacctgatgccgataaagtgaacattcaaattgccgatggcaaagcgacggtcactggtgacggcctgagtcaggaggcgaaggagaaaatccttgttgcggtggggaatatttccggtattgccagtgttgatgatcaggtgaaaacggcgacaccagccactgccagccagttttataccgttaagtctggcgacactctgagtgccatttccaaacaggtctacggtaacgctaatctgtacaataaaatcttcgaagcgaataaaccgatgctaaaaagcccggataaaatttatccggggcaagtgttgcgtattccggaagagtag

SEQ ID NO: 303 - protein, 169 aa, Escherichia coli
MGLFDKLKSLVSDDKKDTGTIEIIAPLSGEIVNIEDVPDVVFAEKIVGDGIAIKPTGNKMVAPVDGTIGKIFETNHAFSIESDSGVELFVHFGIDTVELKGEGFKRIAEEGQRVKVGDTVIEFDLPQLEEKAKSTLTPVVISNMDEIKELIKLSGSVTVGETPVIRIKK

SEQ ID NO: 304 - DNA, 510 bp, Escherichia coli
atgggtttgttcgataaactgaaatctctggtttccgacgacaagaaggataccggaactattgagatcattgctccgctctctggcgagatcgtcaatatcgaagacgtgccggatgtcgtttttgcggaaaaaatcgttggtgatggtattgctatcaaaccaacgggtaacaaaatggtcgcgcctgtagacggcaccattggtaaaatctttgaaaccaaccacgcattctctatcgaatctgatagcggcgttgaactgttcgtccacttcggtatcgacaccgttgaactgaaaggcgaaggcttcaagcgtattgctgaagaaggtcagcgcgtgaaagttggcgatactgtcattgaatttgatctgccgcagctggaagagaaagccaagtctaccctgactccggttgttatctccaacatggacgaaatcaaagaactgatcaaactgtccggtagcgtgactgtgggtgaaaccccggttatccgcatcaagaagtaa

SEQ ID NO: 305 - protein, 482 aa, Escherichia coli
MNNTLPDNIEQLKALLIAQQAVIVRLSGEITGYAREISSLRALVAKLQRMLFGRSSEKSREKIEKKIARAETRITELQNRLGEAQLQLTSMAGETAPKTSDSPVRKALPATLPRDRQVISPAETECPVCSGKLKPLGESISEQLDIINTAFRVIETVRPKRACSRCDCIVQAPQPPKPIERSYASPALLARIIMAKFAEHLPLYRQSEIYARQGVELHRNTMGRWVDIMGEQLRPLYDELKHYVLMPGKVHADDTPVNVLEPGQGKTRTGRLWVYVRDDRNAGSTMPAAVWFSYSPDRKGIHPQQHLADYRGILQADAYAGYNALYESGQATEAACMAHARRKIHDVHVRHPTTVTGEALRRIGELYAIEAEIRGSPAEERLAVRKARTVPLMQSLYEWLQGQMNTLSRHSDTAKAFTYLLKQWDALNEYCRNGWVEIDNNLCENALRVVALGRRNYRTWFLPGKGNGTKESWFFRNRPHHE

SEQ ID NO: 306 - DNA, 1449 bp, Escherichia coli
atgaacaacacactccccgacaacatcgagcaactgaaggccctgctgatcgcacagcaggctgttatcgtccgtctgtctggtgaaataaccggctatgcccgcgagatcagctcactcagagcgctggtcgctaaactgcagagaatgttgttcggtcgcagcagcgagaaaagccgcgagaagatagaaaagaagatcgcacgggcagaaacgcgtataaccgagctccagaacaggcttggtgaggcgcagttgcaactcacctcaatggccggagagacagcgccgaaaacatcagactctcccgtccgcaaagcacttccggcaacacttccccgtgacaggcaggttatctccccggcagaaaccgaatgccccgtctgcagcggtaaactgaaaccgctgggagaaagcatctctgaacaactggatatcatcaacaccgcgttcagggtaatcgaaacggttcgcccaaaacgggcctgcagccggtgcgactgtatagttcaggctccgcagccaccaaaacccatcgagcgcagttacgccagtccggctctgctggcccgcataatcatggctaagttcgccgagcatctgccgctgtaccgtcagtcggaaatctatgcccgccagggcgtggagctgcaccgcaatacgatggggcgctgggttgacatcatgggagagcagcttcgcccgctgtatgatgaactgaagcactatgtgctgatgccgggtaaagtgcatgccgatgacacgccggtaaatgtactggagccgggtcagggtaaaacccgtaccggacggctgtgggtctatgttcgtgacgatcgcaacgccggttcgaccatgccggcagcggtgtggttctcatactctcccgaccgcaaaggcatccacccacagcaacatctggcggactacagaggtatcctgcaggccgatgcatatgcgggttacaatgctctttacgaaagcggtcaggcaaccgaagcggcttgtatggcacatgcccgacgcaagatccacgatgtacatgtccgccatccaacgacagtaacgggagaagcgctccgtcgtatcggggaactgtacgctatcgaggctgagatccgcggcagtccggcagaagagcgactggcggtcagaaaagccagaacggtaccgctaatgcagtcgttgtatgagtggctccaggggcagatgaacacgctgtcgcgccactcggatacagcgaaagcgttcacctatctgctgaagcaatgggacgctctgaacgaatactgccgcaatggctgggtggagatcgacaataacctgtgtgaaaacgccctccgggtagttgcactggggcggcgtaactaccggacgtggtttctgccaggtaaaggcaacggaacaaaagaatcatggtttttccggaaccggccacaccatgaatga

SEQ ID NO: 307 - protein, 299 aa, Escherichia coli
MGNIHGISCTANNYLKQAWNDIKNEYEKNKTYSITLFENTLVCFMRLYKEIRRQQAEDYIPCLECDSLEKEFEEIQNDNDLSLFMKTLRTNDKQIYSGVSGGITYTIQYVEDVDIVRVSLPGRGSESITDFKGYYWYGFMEYIENINACDDVYSDYCFDNDENMSIQPEWINTPGISDLDSGIDLSGISFIQSEINKTYGLKYAPVDGDGYCLLRAILVLKEHEYSWALGSHKTQKQVYEEFIKIVDKQTIEALVDTAFYNLREDVKTLFGVDLQSDNKIQGQGSLMSWNFLFFKKRIY

SEQ ID NO: 308 - DNA, 900 bp, Escherichia coli
atgggtaatatacatggaattagttgcactgcaaataattatttgaagcaagcctggaacgatataaaaaatgagtacgaaaaaaataaaacatattcaatcacgctttttgaaaacacactggtgtgttttatgcggttgtataaagaaatcagacgtcaacaagctgaagactacattccatgcctggaatgcgattcactagaaaaagaatttgaggaaatacagaatgataatgatttatcattatttatgaaaacattgcgtactaatgataaacaaatttattcaggggtttcaggaggtattacatatactatacaatatgttgaagatgttgatattgttagagtatccttgccgggtagaggttcagagtctatcacagattttaaaggttattattggtatggctttatggaatatattgaaaacattaatgcgtgtgatgatgtttattctgattattgttttgataatgatgaaaatatgagtatccagccagaatggataaatacgccgggaatatctgatttagattctggtattgatttgtctggtatatcttttattcagagtgaaattaataaaacttatggattaaaatacgctccagtagatggcgatggctattgtctgttaagggccatactggttttaaaagaacatgagtattcatgggcgctgggcagccataagacgcaaaagcaagtatacgaagagtttattaaaattgttgataaacaaacgatcgaggctcttgttgatacggcattctataatctcagggaagatgtaaagacgttatttggcgttgatctacaatctgacaacaaaattcaggggcagggtagtcttatgtcatggaactttctgttttttaaaaaaagaatttattga

SEQ ID NO: 309 - protein, 141 aa, Escherichia coli
  misc_feature (36)..(36): Xaa can be any naturally occurring amino acid
MSQTFYRCNKGEIMSKTIATENAPAAIGPYVQGVDXGNMIITSGQIPVNPKTGEVPADVAAQARQSLDNVKAIVEAAGLKVGDIVKTTVFVKDLNDFATVNATYEAFFTEHNATFPARSCVEVARLPKDVKIEIEAIAVRR

SEQ ID NO: 310 - DNA, 426 bp, Escherichia coli
atgagccagactttttaccgctgtaataaaggagaaatcatgagcaaaactatcgcgacggaaaatgcaccggcagctatcggtccttacgtacagggcgttgatmtgggcaatatgatcatcacttccggtcagatcccggtaaatccgaaaacgggcgaagtaccggcagacgtcgctgcacaggcacgtcagtcgctggataacgtaaaagcgatcgtcgaagccgctggtctgaaagtgggcgacatcgttaaaactaccgtgtttgtaaaagatctgaacgacttcgcaaccgtaaacgccacttacgaagccttcttcaccgaacacaacgccaccttcccggcacgttcttgcgttgaagttgcccgtctgccgaaagacgtgaagattgagatcgaagcgatcgctgttcgtcgctaa

SEQ ID NO: 311 - protein, 164 aa, Escherichia coli
MVTFHTNHGDIVIKTFDDKAPETVKNFLDYCREGFYNNTIFHRVINGFMIQGGGFEPGMKQKATKEPIKNEANNGLKNTRGTLAMARTQAPHSATAQFFINVVDNDFLNFSGESLQGWGYCVFAEVVEGMDVVDKIKGVATGRSGMHQDVPKEDVIIESVTVSE

SEQ ID NO: 312 - DNA, 495 bp, Escherichia coli
atggttactttccacaccaatcacggcgatattgtcatcaaaacttttgacgataaagcacctgaaacagttaaaaacttcctggactactgccgcgaaggtttttacaacaacaccattttccaccgtgttatcaacggctttatgattcagggcggcggttttgaaccgggcatgaaacaaaaagccaccaaagaaccgatcaaaaacgaagccaacaacggcctgaaaaatacccgtggtacgctggcaatggcccgtactcaggctccgcactctgcaactgcacagttcttcatcaacgtggttgataacgacttcctgaacttctctggcgaaagcctgcaaggttggggctactgcgtgtttgctgaagtggttgaaggcatggacgtggtagacaaaatcaaaggtgttgcaaccggtcgtagcggtatgcaccaggacgtgccaaaagaagacgttatcattgaaagcgtgaccgttagcgagtaa

SEQ ID NO: 313 - protein, 261 aa, Escherichia coli
MGYLNNVTGYRDDLLANRAIVKHGNFALLTPDGLVKNIIPGFENCDATILSTPKLGASFVDYLVTLHQNGGNQQGFGGEGIETFLYVISGNITAKAEGKTFSLSEGGYLYCPPGSLMTFVNAQAEDSQIFLYKRRYVPVEGYAPWLVSGNASELERIHYEGMDDVILLDFLPKELGFDMNMHILSFAPGASHGYIETHVQEHGAYILSGQGVYNLDNNWIPVKKGDYIFMGAYSLQAGYGVGRGEAFSYIYSKDCNRDVEI

SEQ ID NO: 314 - DNA, 786 bp, Escherichia coli
atgggatatttaaataacgtcaccggttaccgcgatgatttactggctaaccgtgcgattgtgaaacacggtaatttcgcactgttaacaccagacggtctggtaaaaaatattattccgggctttgaaaattgtgacgcgacaatcctctccacgccaaagctgggtgcctcttttgttgattatctggtcacactgcatcaaaacggcggcaaccaacagggcttcggtggcgaaggcattgaaacgttcctgtatgtgatctctggaaatatcactgccaaagccgaaggcaaaacattttccttaagcgaaggtggctatctttattgcccgcctggctccttaatgacgtttgttaacgcccaggccgaagacagccaaatctttttatataagcgccgctatgttccggtagaaggctatgcaccgtggctggtttctggcaatgccagcgaactggaacgcattcactatgaaggtatggatgatgtgatcctgctggatttcctgcccaaagagttaggttttgatatgaacatgcatatcctttcttttgcaccaggtgccagccacggttatatcgaaacacatgttcaggaacacggtgcctatattctttccggtcagggggtttataacctcgacaataactggatcccggtgaaaaaaggcgattacatctttatgggcgcttattctttacaggctggttatggcgtagggcgtggtgaagcgttcagctatatttactcgaaagattgtaaccgcgacgtagagatttaa

SEQ ID NO: 315 - protein, 231 aa, Escherichia coli
MITRDFLMNADCKTAFGAIEESLLWSAEQRAASLAATLACRPDERPVWIFGYGSLMWNPALEFTESCTGTLVGWHRAFCLRLTAGRGTAHQPGRMLALKEGGRTTGVAYRLPEETLEQELTLLWKREMITGCYLPTWCQLDLDDGRTVNAIVFIMDPRHPEYESDTRAQVIAPLIAAASGPLGTNAQYLFSLEQELIKLGMQDDGLNDLLVSVKKLLAENYPDGVLRPGFA

SEQ ID NO: 316 - DNA, 696 bp, Escherichia coli
gtgataacgcgtgatttcttgatgaatgccgattgtaaaacggcatttggtgccattgaagaatcactcttatggtcagcagaacaacgggcggcttcgctggcggcgacgctggcttgtcgacctgatgagagaccggtgtggatcttcggttatggatcgttgatgtggaatccggcactggagtttaccgagtcgtgcaccggtacactggttggatggcatcgcgcgttttgcctgcgcctgaccgccgggcgcgggactgcgcaccagccgggacggatgcttgcactaaaagagggcggacgtaccacaggcgtcgcctatcgactgccagaagagacgctggagcaggaactaaccctgttgtggaagcgcgagatgattaccggctgttatctgccaacctggtgtcagcttgatcttgatgatggacgcacagtaaacgccattgtgtttattatggacccgcgacatccagaatatgaatctgacactcgcgctcaggtcatcgcgccgttgattgcggcggcgagcggtccgctgggaaccaacgcacaatacctgttttcactggaacaggagcttatcaaactgggaatgcaggacgatgggctgaatgatttgctggtatcggtaaaaaaactgctggcggagaattatccggatggtgtgttgcggccgggattcgcctga

SEQ ID NO: 317 - protein, 284 aa, Escherichia coli
MLSKQIPLGIYEKALPAGECWLERLQLAKTLGFDFVEMSVDETDERLSRLDWSREQRLALVNAIVETGVRVPSMCLSAHRRFPLGSEDDAVRAQGLEIMRKAIQFAQDVGIRVIQLAGYDVYYQEANNETRRRFRDGLKESVEMASRAQVTLAMEIMDYPLMNSISKALGYAHYLNNPWFQLYPDIGNLSAWDNDVQMELQAGIGHIVAVHVKDTKPGVFKNVPFGEGVVDFERCFETLKQSGYCGPYLIEMWSETAEDPAAEVAKARDWVKARMAKAGMVEAA

SEQ ID NO: 318 - DNA, 855 bp, Escherichia coli
atgttgtccaaacaaatcccgcttggcatctatgaaaaagcgctccccgccggggagtgctggctggaacgcctgcaactggcaaaaacgttgggcttcgattttgtcgagatgtcggtagatgaaacggacgagcgcctgtcgcgcctcgactggagccgcgagcagcgtctggcgctggtgaatgcgattgttgaaaccggcgtgcgcgtgccgtccatgtgcctttctgctcatcgtcgtttcccgctgggcagtgaagatgacgcggtgcgggcgcaggggctggagattatgcgtaaagctatccagttcgcccaggacgttggtattcgcgtgatccaactggcgggctatgacgtttactatcaggaagccaataacgaaacgcgtcgtcgtttccgtgacggcctgaaagagagcgttgagatggcgagccgcgcgcaggtgacgctggcgatggagatcatggattatccgttgatgaactccatcagcaaggcgctgggctacgcgcactatctcaacaatccgtggttccagctgtacccggatatcggcaacctgtcggcgtgggacaacgatgtgcagatggagttgcaggccggaatcgggcatatcgtcgcggtacatgtgaaagacaccaaaccgggcgtcttcaaaaacgtgccatttggcgaaggtgtggtggatttcgaacgttgcttcgaaacgctcaaacagagtggctattgcgggccgtacctgattgagatgtggagcgaaacggcggaagacccggcggcagaagtggcgaaagcgcgtgattgggtgaaagcgcgcatggcgaaagcgggcatggtggaggcggcataa

SEQ ID NO: 319 - protein, 451 aa, Escherichia coli
  misc_feature (147)..(147): Xaa can be any naturally occurring amino acid
MMSAPKITFIGAGSTIFVKNILGDVFHREALKTAHIALMDIDPTRLEESHIVVRKLMDSAGASGKITCHTQQKEALQDADFVVVAFQIGGYAPCTVTDFEVCKRHGLEQTIADTLGPGGIMRALRTIPHLWQICEDMTEVCPDATMXNYVNPMAMNTWAMYARYPHIKQVGLCHSVQGTAEELARDLNIDPATLRYRCAGINHMAFYLELERKTADGSYVNLYPELLAAYDAGQAPKPNIHGNTRCQNIVRYEMFKKLGYFVTESSEHFAEYTPWFIKPGREDLIERYKVPLDEYPKRCVEQLANWHKELEEYKNASRIDIKPSREYASTIMNAIWTGEPSVIYGNVRNDGLIDNLPQGCCVEVACLVDANGIQPTKVGTLPSHLAALMQTNINVQTLLTEAILTENRDRVYHAAMMDPHTAAVLGIDEIYALVDDLIAAHGDWLPGWLHR

SEQ ID NO: 320 - DNA, 1356 bp, Escherichia coli
atgatgtctgcacccaaaattacatttatcggcgctggttcgacgattttcgttaaaaatattcttggtgatgtgttccatcgcgaggcgctgaaaacggcgcatattgccctgatggacattgaccccacccgcctggaagagtcgcatattgtggtgcgtaagctgatggattcagcaggggccagcggcaaaatcacctgccacacccaacagaaagaagccttacaggatgccgattttgtcgtggtggcatttcagattggcggttatgcaccttgcacggtgactgatttcgaggtctgtaagcggcatggtctggaacaaaccattgccgatacgttggggccgggcggtattatgcgcgcgctacgtaccattccgcatctgtggcaaatttgcgaggacatgacggaagtctgccccgatgccaccatgytcaactatgttaacccaatggcgatgaatacctgggcgatgtatgcccgctatccgcatatcaaacaggtcgggctgtgccattcggtgcagggaacggcggaagagctggcgcgtgacctcaatatcgacccggctacgctgcgttaccgttgcgcaggtatcaaccatatggcgttttacctggagctggagcgcaaaaccgccgacggcagttacgtgaatctctacccggaactgctggcggcttatgacgcagggcaggcaccgaagccgaatattcacggcaatactcgctgccagaatattgtgcgctatgaaatgttcaaaaagctgggctatttcgtcacggaatcgtcagaacattttgctgagtacacaccgtggtttattaagccaggtcgtgaggatttgattgagcgttataaagtaccgctggatgagtacccgaaacgctgcgtcgagcagctggcgaactggcataaagagctggaggagtataaaaacgcctcccggattgatattaaaccgtcacgggaatatgccagcacaatcatgaacgctatctggacgggcgagccgagtgtgatttacggcaacgtccgtaacgatggtttgattgataacctgccacaaggatgttgcgtggaagtggcctgtctggttgatgctaatggcattcagccgaccaaagtcggtacgctaccttcgcatctggccgccctgatgcaaaccaacatcaacgtacagacgctgctgaccgaagctattcttacggaaaatcgcgaccgtgtttaccacgctgcgatgatggacccgcatactgccgccgtgctgggcattgacgaaatatatgctcttgttgacgacctgattgccgcccacggcgactggctgccaggctggttgcaccgttaa

SEQ ID NO: 321 - protein, 421 aa, Escherichia coli
MSKTHLTEQKFSDFALHPKVVEALEKKGFHNCTPIQALALPLTLAGRDVAGQAQTGTGKTMAFLTSTFHCLLSHPAIADRKVNQPRALIMAPTRELAVQIHADAEPLAEATGLKLGLAYGGDGYDKQLKVLESGVDILIGTTGRLIDYAKQNHINLGAIQVVVLDEADRMYDLGFIKDIRWLFRRMPPANQRLNMLFSATLSYRVRELAFEQMNNAEYIEVEPEQKTGHRIKEELFYPSNEEKMRLLQTLIEEEWPDRAIIFANTKHRCEEIWGHLAADGHRVGLLTGDVAQKKRLRILDEFTRGDLDILVATDVAARGLHIPAVTHVFNYDLPDDCEDYVHRIGRTGRAGANGHSISLACEEYALNLPAIETYIGHSIPVSKYNPDALMTDLPKPLRLTRPRTGNGPRRTGAPRNRRRSG

SEQ ID NO: 322 - DNA, 1266 bp, Escherichia coli
atgagcaaaacacatttaacagaacagaagttttccgacttcgccctgcatccgaaggttgtagaagcccttgaaaaaaaagggtttcataactgtacgcccattcaggcactggcccttccgctgacgctggcgggtcgtgacgtagccgggcaggcgcaaaccggtaccgggaaaacgatggcgtttcttacgtcaacgtttcattgtcttctctctcatcccgcgattgccgatcgcaaggtgaatcagccgcgtgccttaattatggcaccgacgcgtgaacttgccgtgcagatccatgccgatgcggaaccgctggcggaagctaccggcctgaagctgggtctggcttacggtggtgatggttacgacaaacagctgaaagtgctggaaagcggcgttgacattctgattggcaccacggggcgtttaattgactacgccaagcagaaccacattaacctcggtgccattcaggtagtggtactggacgaagccgatcgcatgtacgatctgggctttattaaagatatccgctggctgttccgccgtatgccgcctgcaaaccagcgcctcaacatgctgttctccgccacgctttcgtaccgggtacgtgaactggcgttcgagcagatgaacaatgccgaatatattgaagtggaaccggaacagaaaacgggccaccgtattaaagaagagcttttctacccttctaacgaagaaaaaatgcgtttgctgcaaacgctgatcgaagaagagtggccagacagagcgattattttcgccaataccaaacaccgttgtgaagagatctggggccacctggcggcagatggtcatcgtgtcggtttgttgacaggcgatgtcgcgcagaaaaaacgtctgcgtattcttgatgaatttacccgtggcgatctggatattctggttgccaccgacgttgccgcgcgtggtttgcatattccggcagtgacgcacgtctttaactacgatttacccgatgactgtgaagattacgttcaccgtattggtcgtacaggtcgcgcaggcgcaaacggtcactctattagcctggcgtgtgaagagtatgcattgaatttgcctgctattgagacctatattggtcactcaattccggtaagcaaatacaatccggacgcattgatgaccgatctgccaaaaccgctgcgcctcacgcgcccgcgcacaggcaatggtccgcgtcgtactggcgctccgcgtaatcgtcgtcgttcaggttaa

SEQ ID NO: 323 - protein, 193 aa, Escherichia coli
MSFELPALPYAKDALAPHISAETIEYHYGKHHQTYVTNLNNLIKGTAFEGKSLEEIIRSSEGGVFNNAAQVWNHTFYWNCLAPNAGGEPTGKVAEAIAASFGSFADFKAQFTDAAIKNFGSGWTWLVKNSDGKLAIVSTSNAGTPLTTDATPLLTVDVWEHAYYIDYRNARPGYLEHFWALVNWEFVAKNLAA

SEQ ID NO: 324 - DNA, 582 bp, Escherichia coli
atgtcattcgaattacctgcactaccatatgctaaagatgctctggcaccgcacatttctgcggaaactatcgagtatcactacggcaagcatcatcagacttatgtcactaacctgaacaacctgattaaaggtaccgcgtttgaaggtaaatcactggaagagattattcgcagctctgaaggtggcgtattcaacaacgcagctcaggtctggaaccatactttctactggaactgcctggcaccgaacgccggtggcgaaccgactggaaaagtcgctgaagctatcgccgcatcttttggcagctttgccgatttcaaagctcagtttactgatgcagcgatcaaaaactttggttctggctggacctggctggtgaaaaacagcgatggcaaactggctatcgtttcaacctctaacgcgggtactccgctgaccaccgatgcgactccgctgctaaccgttgatgtctgggaacacgcatattacatcgactatcgcaatgcacgtcctggctatcttgagcacttctgggcgctggtgaactgggaattcgtagcgaaaaatctcgctgcataa

SEQ ID NO: 325 - protein, 289 aa, Escherichia coli
MSILIDKNTKVICQGFTGSQGTFHSEQAIAYGTKMVGGVTPGKGGTTHLGLPVFNTVREAVAATGATASVIYVPAPFCKDSILEAIDAGIKLIITITEGIPTLDMLTVKVKLDEAGVRMIGPNCPGVITPGECKIGIQPGHIHKPGKVGIVSRSGTLTYEAVKQTTDYGFGQSTCVGIGGDPIPGSNFIDILEMFEKDPQTEAIVMIGEIGGSAEEEAAAYIKEHVTKPVVGYIAGVTAPKGKRMGHAGAIIAGGKGTADEKFAALEAAGVKTVRSLADIGEALKTVLK

SEQ ID NO: 326 - DNA, 870 bp, Escherichia coli
atgtccattttaattgataaaaacaccaaggttatctgccagggctttaccggtagccaggggactttccactcagaacaggccattgcatacggcactaaaatggttggcggcgtaaccccaggtaaaggcggtactacccacctcggcctgccggtgttcaacaccgtgcgtgaagctgttgctgctactggcgctaccgcttctgttatctacgtaccagcaccgttctgcaaagactccattctggaagccatcgacgcaggcatcaaactgattatcaccatcactgaaggcatcccgacgctggatatgctgaccgtgaaagtgaagctggatgaagcaggcgttcgtatgatcggcccgaactgcccaggcgttatcactccgggtgaatgcaaaatcggtattcagcctggtcacattcacaaaccgggtaaagtgggtatcgtttcccgttccggtacactgacctatgaagcggttaaacagaccacggattacggtttcggtcagtcgacctgtgtcggtatcggcggtgacccgatccctggctctaactttatcgacattctcgaaatgttcgaaaaagatccgcagaccgaagcgatcgtgatgatcggtgagatcggcggtagcgctgaagaagaagcagctgcgtacatcaaagagcacgttaccaagccagttgtgggttacatcgctggtgtgactgcgccgaaaggcaaacgtatgggccacgcgggtgccatcattgccggtgggaaagggactgcggatgagaaattcgctgctctggaagccgcaggcgtgaaaaccgttcgcagcctggcggatatcggtgaagcactgaaaactgttctgaaataa

SEQ ID NO: 327 - protein, 317 aa, Escherichia coli
MTDKLTSLRQYTTVVADTGDIAAMKLYQPQDATTNPSLILNAAQIPEYRKLIDDAVAWAKQQSNDRAQQIVDATDKLAVNIGLEILKLVPGRISTEVDARLSYDTEASIAKAKRLIKLYNDAGISNDRILIKLASTWQGIRAAEQLEKEGINCNLTLLFSFAQARACAEAGVFLISPFVGRILDWYKANTDKKEYAPAEDPGVVSVSEIYQYYKEHGYETVVMGASFRNIGEILELAGCDRLTIAPALLKELAESEGAIERKLSYTGEVKARPARITESEFLWQHNQDPMAVDKLAEGIRKFAIDQEKLEKMIGDLL

SEQ ID NO: 328 - DNA, 954 bp, Escherichia coli
atgacggacaaattgacctcccttcgtcagtacaccaccgtagtggccgacactggggacatcgcggcaatgaagctgtatcaaccgcaggatgccacaaccaacccttctctcattcttaacgcagcgcagattccggaataccgtaagttgattgatgatgctgtcgcctgggcgaaacagcagagcaacgatcgcgcgcagcagatcgtggacgcgactgacaaactggcagtaaatattggtctggaaatcctgaaactggttccgggccgtatctcaactgaagttgatgcgcgtctttcctatgacacagaagcgtcaattgcgaaagcaaaacgcctgatcaaactctacaacgatgcaggtattagcaacgatcgtattctgatcaaactggcttctacctggcagggtatccgtgctgcggaacagctggaaaaagaaggtatcaactgtaacctgaccctgctgttctccttcgctcaggctcgtgcttgtgcggaagcgggcgtgttcctgatctcgccgtttgttggccgtattcttgactggtacaaagcgaataccgataagaaagagtacgctccggcagaagatccgggcgtggtttctgtatctgaaatctaccagtactacaaagagcacggttatgaaaccgtggttatgggcgcaagcttccgtaacatcggcgaaattctggaactggcaggctgcgaccgtctgaccatcgcaccggcactgctgaaagagctggctgagagcgaaggggctatcgaacgtaaactgtcttacaccggcgaagtgaaagcgcgtccggcgcgtatcactgagtccgagttcctgtggcagcacaaccaggatccaatggcagtagataaactggcggaaggtatccgtaagtttgctattgaccaggaaaaactggaaaaaatgatcggcgatctgctgtaa

SEQ ID NO: 329 - protein, 142 aa, Escherichia coli
MYKTIIMPVDVFEMELSDKAVRHAEFLAQDDGVIHLLHVLPGSASLSLHRFAADVRRFEEHLQHEAEERLQTMVSHFTIDPSRIKQHVRFGSVRDEVNELAEELGADVVVIGSRNPSISTHLLGSNASSVIRHANLPVLVVR

SEQ ID NO: 330 - DNA, 429 bp, Escherichia coli
atgtataagacaatcattatgccagttgatgtatttgaaatggaattgagcgacaaagctgttcgccacgctgaattcctcgcccaggatgacggagttattcatctacttcacgtactacccgggtcagccagcctgagcctgcaccgttttgccgctgatgtgcgtcgttttgaagagcatctgcaacatgaagcagaagaacgtttgcaaacgatggtcagccacttcaccatcgatccttcccgcattaaacaacatgtccgttttggtagcgtgcgggatgaagtcaatgagttagcagaagaactgggggctgatgttgtagttattggttctcgcaacccatcgatttcgacccatctgttaggttctaacgcctcgagcgtgatccgccacgccaatctgcctgtactggtcgttcgctaa

SEQ ID NO: 331 - protein, 181 aa, Escherichia coli
MARAVAEGASKVDGAEVVVKRVPETMSPQLFEKAGGKTQTAPVATPQELANYDAIIFGTPTRFGNMSGQMRTFLDQTGGLWASGALYGKLASVFSSTGTGGGQEQTITSTWTTLAHHGMVIVPIGYAAQELFDVSQVRGGTPYGATTIAGGDGSRQPSQEELSIARYQGEYVAGLAVKLNG

SEQ ID NO: 332 - DNA, 546 bp, Escherichia coli
atggcacgcgcagtcgctgagggtgcaagcaaagtggatggcgctgaagttgtcgttaagcgtgtaccggaaaccatgtcgccgcaattatttgaaaaagcaggcggtaaaacgcaaactgcaccggttgcaaccccgcaagaactggccaattacgacgccattatttttggtacacctacccgctttggcaacatgtccggtcaaatgcgtaccttcctcgaccagacgggcggcctgtgggcttccggcgcactatacggaaaactggcgagcgtctttagttccaccggtactggcggcggtcaggaacaaaccatcacatccacctggacgacccttgcgcatcacggcatggtgattgtccccattggctacgcagcgcaggaattatttgacgtttcacaggttcgcggcggtacgccgtacggcgcaaccaccatcgcaggcggtgacggttcacgccagcccagccaggaagaactgtctattgctcgttatcaaggggaatatgtcgcaggtctggcagttaaacttaatggctaa

SEQ ID NO: 333 - protein, 94 aa, Escherichia coli
MLQSNEYFSGKVKSIGFSSSSTGRASVGVMVEGEYTFSTAEPEEMTVISGALNVLLPDATDWQVYEAGSVFNVPGHSEFHLQVAEPTSYLCRYL

SEQ ID NO: 334 - DNA, 285 bp, Escherichia coli
atgcttcaaagtaatgagtacttttccggcaaagtgaaatcgatcggcttttccagcagcagcactggtcgcgccagcgtgggtgttatggttgaaggcgaatacaccttcagcaccgctgagccggaagagatgacggtaatcagtggcgcgctgaatgtgttactgcctgacgcgaccgactggcaagtgtatgaagccggttcggtgtttaatgttcccggtcacagtgagtttcatctgcaagttgccgaacccacctcttatctgtgccgctatctgtaa

SEQ ID NO: 335 - protein, 117 aa, Escherichia coli
MKYVDGFVVAVPADKKDAYREMAAKAAPLFKEFGALRIVECWASDVPDGKVTDFRMAVKAEENEEVVFSWIEYPSKEVRDAANQKMMSDPRMKEFGESMPFDGKRMIYGGFESIIDE

SEQ ID NO: 336 - DNA, 354 bp, Escherichia coli
atgaagtatgttgatggttttgtggttgccgttcctgccgataaaaaggatgcctatcgggaaatggccgctaaggccgcgccattgtttaaagagtttggcgcgcttcgtattgtcgaatgctgggccagcgatgtaccggatggcaaagtgaccgattttcgtatggcggtgaaagcggaagagaatgaagaggttgtctttagctggattgaatacccttcaaaagaggtccgcgacgcagctaatcaaaagatgatgtcggacccacggatgaaagagttcggcgagtccatgccgtttgacggcaagcgaatgatctatggcggattcgagtcaatcatcgacgaatag

SEQ ID NO: 337 - protein, 228 aa, Escherichia coli
  misc_feature (183)..(183): Xaa can be any naturally occurring amino acid
  misc_feature (219)..(219): Xaa can be any naturally occurring amino acid
MTVETQLNPTQPVNQQIYRILRRDIVHCLIAPGTPLSEKEVSVRFNVSRQPVREAFIKLAENGLIQIRPQRGSYVNKISMAQVRNGSFIRQAIECAVARRAASMITESQCYQLEQNLHQQRIAIERKQLDDFFELDDNFHQLLTQIADCQLAWDTIENLKATVDRVRYMSFDHVSPPEMLLRXHLDIFSALQKRDGDAVERAMTQHLQEISESVRQIRXENSDWFSEE

SEQ ID NO: 338 - DNA, 687 bp, Escherichia coli
atgaccgtcgaaacgcaacttaatcccacacagcctgtcaatcagcagatttatcgtattcttcgtcgcgacattgtccattgcctgattgcaccaggcacaccgttgtcggaaaaagaagtttctgttcgtttcaatgtgtcacgccagccggttcgtgaagcctttattaaactggcggaaaacggcctgattcaaattcgtccgcagcgtggcagctacgtcaacaaaatttccatggcccaggtgcgcaacggcagttttatccgtcaggccattgagtgcgcggtggcgcgtcgggcggcgagtatgattaccgaaagccagtgctaccaactggaacaaaatcttcaccagcaacgcattgccattgagcgcaagcaactggatgatttttttgaacttgatgacaacttccatcaactcctgacgcagattgccgactgtcaactggcgtgggataccattgagaacctgaaagcgaccgttgatcgcgtgcgctatatgagtttcgaccatgtttctccaccagaaatgctgttacgccmgcatcttgatatattctctgccctgcaaaaacgtgatggcgatgcggtagaacgtgcaatgacgcaacatttgcaggaaatcagcgaatccgtgcgccagatccgccmggaaaatagcgactggtttagcgaagagtaa

SEQ ID NO: 339 - protein, 69 aa, Escherichia coli
MNKDEAGGNWKQFKGKVKEQWGKLTDDDMTIIEGKRDQLVGKIQERYGYQKDQAEKEVVDWETRNEYRW

SEQ ID NO: 340 - DNA, 210 bp, Escherichia coli
atgaataaagatgaagccggcggtaactggaaacagtttaaaggtaaagtgaaagagcaatggggcaaactgaccgatgatgatatgacgatcattgaaggtaaacgtgatcaactggtcggtaaaatccaggaacgttatggttatcagaaagatcaggcagaaaaagaggtcgtggattgggaaacccgcaatgaatatcgctggtaa
